(19) United States
(12) Patent Application Publication
(10) Pub. No.: US 2024/0279332 A1
(43) Pub. Date: Aug. 22, 2024

(54) Treatment of Cardiovascular Disease with TREM-1 Antigen Binding Proteins

(71) Applicant: AMGEN INC., Thousand Oaks, CA (US)

(72) Inventors: Susan SHETTERLY, Thousand Oaks, CA (US); Simon Mark JACKSON, Thousand Oaks, CA (US)

(21) Appl. No.: 18/571,614

(22) PCT Filed: Jun. 24, 2022
(86) PCT No.: PCT/US22/34834

§ 371 Date: Dec. 18, 2023

Related U.S. Application Data
(60) Provisional application No. 63/353,223, filed on Jun. 17, 2022.
(60) Provisional application No. 63/215,260, filed on Jun. 25, 2021.

(51) Int. Cl. C07K 16/28; A61K 45/06

(52) U.S. Cl. CPC C07K 16/2803; A61K 45/06; C07K 2317/24; C07K 2317/52; C07K 2317/565; C07K 2317/567

(57) ABSTRACT

The present disclosure relates, in general, to methods of treating cardiovascular disease, such as atherosclerosis or myocardial infarction, using antigen binding proteins that bind to TREM-1, and compositions thereof.

### CROSS-REFERENCE TO RELATED APPLICATION(S)

[0001] The present application claims the priority benefit of U.S. Provisional Patent Application No. 63/215,260, filed Jun. 25, 2021 and U.S. Provisional Patent Application No. 63/353,223, filed Jun. 17, 2022, which are hereby incorporated by reference in their entirety.

### FIELD OF THE DISCLOSURE

[0002] The present disclosure relates to antigen binding moieties specific for, TrigGering Receptor Expressed on Myeloid cells 1 (TREM-1) and compositions thereof, for the treatment of cardiovascular conditions, such as atherosclerosis or myocardial infarction (MI).

### INCORPORATION BY REFERENCE OF MATERIAL SUBMITTED ELECTRONICALLY

[0003] The Sequence Listing, which is a part of the present disclosure, is submitted concurrently with the specification as a text file. The name of the text file containing the Sequence Listing is “56967P2_Seqlisting.txt”, which was created on Jun. 17, 2022 and is 1368364 bytes in size. The subject matter of the Sequence Listing is incorporated herein in its entirety by reference.

### BACKGROUND OF THE DISCLOSURE

[0004] Triggering receptor expressed on myeloid cells 1 (TREM1, TREM-1, CD354) is an Ig family member expressed in neutrophil, monocyte and macrophage cells. TREM-1 is a mediator of the myeloid cell immune response, Activation through TREM-1 induces inflammatory cytokines, including IL-8, MCP/CCL2, and tumor necrosis factor alpha (TNFα). PGLYRP1 (Peptidoglycan recognition protein 1) has recently been reported as a ligand for TREM-1 (Read, J. Immunol. 194: 1417-1421, 2015), and potential other ligands remain to be determined. TREM-1 has been implicated in upregulating the inflammatory response in sepsis (Ford et al. Curr Op Immunol. 2009; 21:38-46), and blockade of TREM-1 activity by TREM-1-Fc or antagonistic peptide (e.g. LP17) reduced the endotoxic effects in septic animals (Ford, supra, Qian et al., J.Int J Clin Exp Med. 2014 7(7):1650-8). TREM-1 knockout mice are viable and protected from DSS colitis and T cell transfer colitis (Weber, PLoS Pathoq, 10(1):1003900, 2014).

[0005] Treatment with a TREM-1-Fc fusion improved survival and reduced TNFα induction after LPS challenge in mice (Bouchon, Nature, 410:1103-7, 2001). An anti-TREM-1 antibody was reported to reduce secretion of inflammatory cytokines from lamina propria cells isolated from IBD patients stimulated with TREM-1 agonist PGLYRP-1/peptidoglycan (Brynjolfsson et al., Inflamm Bowel Dis 22(8):1803-11, 2016). Additionally, nangibotide, achemically synthesized 12 L-amino acid peptide, derived from the protein TREM-like transcript-1 (TLT-1), has been investigated as a treatment for septic shock (Cuvier et al., Br J Clin Pharmacol. 2018 October; 84(10): 2270-2279). While TREM-1 is primarily expressed on monocyte/macrophage and neutrophils, during inflammation it is also found on bronchial, corneal, gastric epithelial cells, and hepatic endothelial cells.

### SUMMARY OF THE DISCLOSURE

[0006] The present disclosure provides antigen binding proteins specific for human TrigGering Receptor Expressed on Myeloid cells 1 (TREM-1) and are useful in the treatment of cardiovascular diseases.

[0007] Provided herein is a method of treating cardiovascular disease (e.g., atherosclerosis or myocardial infarction) comprising administering to a subject in need thereof a therapeutically effective amount of an antigen binding protein that binds to TrigGering Receptor Expressed on Myeloid cells 1 (TREM-1), the antigen binding protein comprising:
[0008] a. a light chain variable domain comprising:
   [0009] i. a light chain CDR1 comprising an amino acid sequence selected from SEQ ID NOS: 10, 30, 50, 70, 90, 110, 130, 150, 170, 190, 210, 230, 250, 270 and 544;
   [0010] ii. a light chain CDR2 comprising an amino acid sequence selected from SEQ ID NOS: 11, 31, 51, 71, 91, 111, 131, 151, 171, 191, 211, 231, 251, 271, and 545;
   [0011] iii. a light chain CDR3 comprising an amino acid sequence selected from SEQ ID NOS: 12, 32, 52, 72, 92, 112, 132, 152, 172, 192, 212, 232, 252, 272 and 546; and
[0012] b. a heavy chain variable domain comprising:
   [0013] i. a heavy chain CDR1 comprising an amino acid sequence selected from SEQ ID NOS: 16, 36, 56, 76, 96, 116, 136, 156, 176, 196, 216, 236, 256, 276, and 550;
   [0014] ii. a heavy chain CDR2 comprising an amino acid sequence selected from SEQ ID NOS: 17, 37, 57, 77, 97, 117, 137, 157, 177, 197, 217, 237, 257, 277, and 551; and
   [0015] iii. a heavy chain CDR3 comprising an amino acid sequence selected from SEQ ID NOS: 18, 38, 58, 78, 98, 118, 138, 158, 178, 198, 218, 238, 258, 278, and 552.

[0016] In various embodiments, the antigen binding protein comprises:
[0017] a. the light chain CDR1 sequence set out in SEQ ID NO: 10, 30, 50, 90, 130, 150, or 270;
[0018] b. the light chain CDR2 sequence set out in SEQ ID NO: 11, 31, 51, 91, 131, 151, or 271;
[0019] c. the light chain CDR3 sequence set out in SEQ ID NO: 12, 32, 52, 92, 132, 152, or 272
[0020] d. the heavy chain CDR1 sequence set out in SEQ ID NO: 16, 36, 56, 96, 136, 156, or 276;
[0021] e. the heavy chain CDR2 sequence set out in SEQ ID NO: 17, 37, 57, 97, 137, 157, or 277; and
[0022] f. the heavy chain CDR3 sequence set out in SEQ ID NO: 18, 38, 58, 98, 138, 158, or 278.

[0023] In various embodiments, the antigen binding protein comprises:
[0024] a. the light chain CDR1 sequence set out in SEQ ID NO: 30 or 90;
[0025] b. the light chain CDR2 sequence set out in SEQ ID NO: 31 or 91;
[0026] c. the light chain CDR3 sequence set out in SEQ ID NO: 32 or 92;
[0027] d. the heavy chain CDR1 sequence set out in SEQ ID NO: 36 or 096;
[0028] e. the heavy chain CDR2 sequence set out in SEQ ID NO: 37 or 97; and
[0029] f. the heavy chain CDR3 sequence set out in SEQ ID NOS: 38 or 98.

[0030] Also contemplated are consensus sequences of the TREM-1 antibody/antigen binding protein heavy and light chain CDRs and/or variable region sequences disclosed herein. For example, in various embodiments, the TREM-1 antibody comprises an antigen binding domain comprising a sequence having a light chain variable region comprising a LCDR1 amino acid sequence selected from the group consisting of:
[0031] X₁ASQSX₂X₃X₄NLA (SEQ ID NO: 553), wherein X₁ is R or Q, wherein X₂ is V or I, wherein X₃ is N or S, and wherein X₄ is S, H, I, V or A;
[0032] QASX₁DIX₂X₃X₄LN (SEQ ID NO: 558), wherein X₁ is R or Q, wherein X₂ is R, S, N or F, wherein X₃ is K or N, and wherein X₄ is H, Y or D;

(SEQ ID NO: 566)
RASQSVNSNLA;
(SEQ ID NO: 567)
QASQDIRKHLN;
(SEQ ID NO: 568)
RASQDISSNLN;
(SEQ ID NO: 569)
QASQDIHLN;
(SEQ ID NO: 570)
RASQGIRKWLA
(SEQ ID NO: 571)
RASQSVNSNLA
and
(SEQ ID NO: 572)
SGDKLGERVS.

[0033] In various embodiments, the TREM-1 antigen binding protein comprises an antigen binding domain comprising a sequence having a light chain variable region comprising a LCDR2 amino acid sequence selected from the group consisting of:
[0034] GAX₁X₂RAT (SEQ ID NO: 554), wherein X₁ is S or Y, and wherein X₂ is T or I;
[0035] X₁X₂X₃X₄LET (SEQ ID NO: 560), wherein X₁ is D, G or H, wherein X₂ is A, V or T, wherein X₃ is S, A or Y, and wherein X₄ is T or N;

(SEQ ID NO: 573)
GASTRAT;
(SEQ ID NO: 574)
DASNLET;
and
(SEQ ID NO: 575)
AASRLQS.

[0036] In various embodiments, the TREM-1 antigen binding protein comprises an antigen binding domain comprising a sequence having a light chain variable region comprising a LCDR3 amino acid sequence selected from the group consisting of
[0037] QX₁X₂X₃X₄X₅X₆PX₇T (SEQ ID NO: 555); wherein X₁ is Q, H or E, wherein X₂ is F or Y, wherein X₃ is K, Y or I, wherein X₄ is N, T, L, I, or M; wherein X₅ is W, F, H or Y, wherein X₆ is absent or P; wherein X₇ is W, N, Y, H or L;
[0038] QX₁YX₃X₄X₅PX₆T (SEQ ID NO: 561), wherein X₁ is Q or H, wherein X₂ is D, A or G, wherein X₃ is N or K; wherein X₄ is L or I, and wherein X₅ is I or L;

(SEQ ID NO: 576)
QQFKNWPPT;
(SEQ ID NO: 577)
QHYDNLPIT;
(SEQ ID NO: 578)
LQAHGFPWT;
(SEQ ID NO: 579)
QQYDNLPLT
and
(SEQ ID NO: 580)
QFWPPWT.

[0039] In various embodiments, the TREM-1 antigen binding protein comprises an antigen binding domain comprising a sequence having a heavy chain variable region comprising a HCDR1 amino acid sequence selected from the group consisting of:
[0040] X₁X₂X₃MX₄ (SEQ ID NO: 556), wherein X₁ is A, R, T or S, wherein X₂ is Y or N, wherein X₃ is A or W, and wherein X₄ is S or N;
[0041] X₁YDIN (SEQ ID NO: 563), wherein X₁ is R or S; GYYX₁H, wherein X₁ is M or I;

(SEQ ID NO: 581)
AYAMS;
(SEQ ID NO: 582)
RYDIN;
and
(SEQ ID NO: 583)
SYWMS.

[0042] In various embodiments, the TREM-1 antigen binding protein comprises an antigen binding domain comprising a sequence having a heavy chain variable region comprising a HCDR2 amino acid sequence selected from the group consisting of:
[0043] X₁X₂X₃X₄X₅X₆ X₇X₈ X₉YYX₁₀X₁₁X₁₂VKG (SEQ ID NO: 559), wherein X₁ is T, E, or S, wherein X₂ is absent or is M, V, or I, wherein X₃ is S, R or K, wherein X₄ is G or Q, wherein X₅ is S, D or H, wherein X₆ is G, S L, or A, wherein X₇ is S, G, or R, wherein X₈ is T, S, P or E, wherein X₉ is T or I, wherein X₁₀ is A or V, wherein X₁₁ is D or E, and wherein X₁₂ is S or A;
[0044] X₁X₂NPX₃X₄GX₅X₆GX₇X₈ X₉X₁₀FX₁₁X₁₂ (SEQ ID NO: 564), wherein X₁ is W or R, wherein X₂ is M or L, wherein X₃ is N, Q, or K, wherein X₄ is S, A, or R, wherein X₅ is N, or Q, wherein X₆ is S, A, or T, wherein X₇ is S, Q, or Y, wherein X₈ is V or T, wherein X₉ is Q or K, wherein X₁₀ is K or N, wherein X₁₁ is R or Q, and wherein X₁₂ is G or D;

(SEQ ID NO: 584)
TSGSGSTTYYADSVKG;
(SEQ ID NO: 585)
WMNPNSGNSSVQKFRG;
(SEQ ID NO: 586)
NIKQDGSEEYYVDSVKG;
and
(SEQ ID NO: 841)
TSGSGTYYADSVKG.

[0045] In various embodiments, the TREM-1 antigen binding protein comprises an antigen binding domain comprising a sequence having a heavy chain variable region comprising a HCDR3 amino acid sequence selected from the group consisting of:
[0046] X₁X₂X₃X₄X₅X₆ X₇ F X₈YYX₉ (SEQ ID NO: 557), wherein X₁ is V, E, A or G, wherein X₂ is A, F, Y or G, wherein X₃ is G, S, Y or W, wherein X₄ is S or R, wherein X₅ is absent or is N, wherein X₆ is F, S, Y, or absent, wherein X₇ is L or F or absent, wherein X₈ is D or E, and wherein X₉ is Y, H or S;
[0047] X₁X₂X₃X₄ X₅X₆ X₇X₈ X₉X₁₀X₁₁X₁₂FX₁₃X₁₄ (SEQ ID NO: 565); wherein X₁ is G, L or R, wherein X₂ is G, I, or R, wherein X₃ is Y, R, I, G, or A, wherein X₄ is T, S, Y, or V, wherein X₅ is S or Y, wherein X₆ is S, A, I, or R, wherein X₇ is W, A, or S, wherein X₈ is absent or is S, wherein X₉ is absent or is F, W, or Y, wherein X₁₀ is R, S, H, K, or E, wherein X₁₁ is W, H, Y, or F, wherein X₁₂ is Y, V, A, or S, wherein X₁₃ is D or Q, and wherein X₁₄ is L, Y, I, or H;

(SEQ ID NO: 842)
VAGSNFLFDY;
(SEQ ID NO: 843)
GGYTSSWRWYFDL;
(SEQ ID NO: 844)
GGYTSSWSRWYFDL;
and
(SEQ ID NO: 845)
DYGDSFDY.

[0048] In various embodiments, provided herein is an isolated antigen binding protein, wherein the antigen binding protein:
[0049] a. is an antibody or antibody fragment;
[0050] b. binds to human TREM-1 having the amino acid sequence set forth in SEQ ID NO: 2;
[0051] c. comprises a light chain variable domain comprising:
   [0052] i. a light chain CDR1 comprising an amino acid sequence X₁ASQSX₂X₃X₄NLA (SEQ ID NO: 553), wherein X₁ is R or Q, wherein X₂ is V or I, wherein X₃ is N or S, and wherein X₄ is S, H, I, V or A;
   [0053] ii. a light chain CDR2 comprising an amino acid sequence GAX₁X₂RAT (SEQ ID NO: 554), wherein X₁ is S or Y, and wherein X₂ is T or I; and
   [0054] iii. a light chain CDR3 comprising an amino acid sequence QX₁X₂X₃X₄X₅X₆PX₇T (SEQ ID NO: 555); wherein X₁ is Q, H or E, wherein X₂ is F or Y, wherein X₃ is K, Y or I, wherein X₄ is N, T, L, I, or M; wherein X₅ is W, F, H or Y, wherein X₆ is absent or P; wherein X₇ is W, N, Y, H or L; and
[0055] d. comprises a heavy chain variable domain comprising:
   [0056] i. a heavy chain CDR1 comprising an amino acid sequence X₁X₂X₃MX₄ (SEQ ID NO: 556), wherein X₁ is A, R, T or S, wherein X₂ is Y or N, wherein X₃ is A or W, and wherein X₄ is S or N;
   [0057] ii. a heavy chain CDR2 comprising an amino acid sequence X₁X₂X₃X₄X₅X₆ X₇X₈ X₉YYX₁₀X₁₁X₁₂VKG (SEQ ID NO: 559), wherein X₁ is T, E, or S, wherein X₂ is absent or is M, V, or I, wherein X₃ is S, R or K, wherein X₄ is G or Q, wherein X₅ is S, D or H, wherein X₆ is G, S L, or A, wherein X₇ is S, G, or R, wherein X₈ is T, S, P or E, wherein X₉ is T or I, wherein X₁₀ is A or V, wherein X₁₁ is D or E, and wherein X₁₂ is S or A; and
   [0058] iii. a heavy chain CDR3 comprising an amino acid sequence X₁X₂X₃X₄X₅X₆ X₇ F X₈YYX₉ (SEQ ID NO: 557), wherein X₁ is V, E, A or G, wherein X₂ is A, F, Y or G, wherein X₃ is G, S, Y or W, wherein X₄ is S or R, wherein X₅ is absent or is N, wherein X₆ is F, S, Y, or absent, wherein X₇ is L or F or absent, wherein X₈ is D or E, and wherein X₉ is Y, H or S.

[0059] In various embodiments, the antigen binding protein comprises:
[0060] a. a light chain variable domain comprising:
[0061] i. a light chain CDR1 comprising an amino acid sequence RASQSVNSNLA (SEQ ID NO: 556);
[0062] ii. a light chain CDR2 comprising an amino acid sequence GASTRAT (SEQ ID NO: 573);
[0063] iii. a light chain CDR3 comprising an amino acid sequence QQFKNWPPT (SEQ ID NO: 576); and
[0064] b. a heavy chain variable domain comprising:
   [0065] i. a heavy chain CDR1 comprising an amino acid sequence AYAMS (SEQ ID NO: 581);
   [0066] ii. a heavy chain CDR2 comprising an amino acid sequence TSGSGSTTYYADSVKG (SEQ ID NO: 584); and
   [0067] iii. a heavy chain CDR3 comprising an amino acid sequence VAGSNFLFDY (SEQ ID NO: 842).

[0068] In various embodiments, the disclosure provides an isolated antigen binding protein, wherein the antigen binding protein:
[0069] a. is an antibody or antibody fragment;
[0070] b. binds to human TREM-1 having the amino acid sequence set forth in SEQ ID NO: 2;
[0071] c. comprises a light chain variable domain comprising:
   [0072] i. a light chain CDR1 comprising an amino acid sequence QASX₁DIX₂X₃X₄LN (SEQ ID NO: 558), wherein X₁ is R or Q, wherein X₂ is R, S, N or F, wherein X₃ is K or N, and wherein X₄ is H, Y or D;
   [0073] ii. a light chain CDR2 comprising an amino acid sequence X₁X₂X₃X₄LET (SEQ ID NO: 560), wherein X, is D, G or H, wherein X₂ is A, V or T, wherein X₃ is S, A or Y, and wherein X₄ is T or N;
   [0074] iii. a light chain CDR3 comprising an amino acid sequence QX₁YX₃X₄X₅PX₆T (SEQ ID NO: 561), wherein X₁ is Q or H, wherein X₂ is D, A or G, wherein X₃ is N or K; wherein X₄ is L or I, and wherein X₅ is I or L; and
[0075] d. comprises a heavy chain variable domain comprising:
   [0076] i. a heavy chain CDR1 comprising an amino acid sequence X₁YDIN (SEQ ID NO: 563), wherein X₁ is R or S;
   [0077] ii. a heavy chain CDR2 comprising an amino acid sequence X₁X₂NPX₃X₄GX₅X₆GX₇X₈ X₉X₁₀FX₁₁X₁₂ (SEQ ID NO: 564), wherein X₁ is W or R, wherein X₂ is M or L, wherein X₃ is N, Q, or K, wherein X₄ is S, A, or R, wherein X₅ is N, or Q, wherein X₆ is S, A, or T, wherein X₇ is S, Q, or Y, wherein X₈ is V or T, wherein X₉ is Q or K, wherein X₁₀ is K or N, wherein X₁₁ is R or Q, and wherein X₁₂ is G or D; and
   [0078] iii. a heavy chain CDR3 comprising an amino acid sequence X₁X₂X₃X₄ X₅X₆ X₇X₈ X₉X₁₀X₁₁X₁₂FX₁₃X₁₄ (SEQ ID NO: 565); wherein X₁ is G, L or R, wherein X₂ is G, I, or R, wherein X₃ is Y, R, I, G, or A, wherein X₄ is T, S, Y, or V, wherein X₅ is S or Y, wherein X₆ is S, A, I, or R, wherein X₇ is W, A, or S, wherein X₈ is absent or is S, wherein X₉ is absent or is F, W, or Y, and wherein X₁₀ is R, S, H, K, or E, wherein X₁₁ is W, H, Y, or F, wherein X₁₂ is Y, V, A, or S, wherein X₁₃ is D or Q, and wherein X₁₄ is L, Y, I, or H.

[0079] In various embodiments, the antigen binding protein comprises:
[0080] a. a light chain variable domain comprising:
   [0081] i. a light chain CDR1 comprising an amino acid sequence QASQDIRKHLN (SEQ ID NO: 567);
   [0082] ii. a light chain CDR2 comprising an amino acid sequence DASNLET (SEQ ID NO: 574); and
   [0083] iii. a light chain CDR3 comprising an amino acid sequence QHYDNLPIT (SEQ ID NO: 577); and
[0084] b. a heavy chain variable domain comprising:
   [0085] i. a heavy chain CDR1 comprising an amino acid sequence RYDIN (SEQ ID NO: 582);
   [0086] ii. a heavy chain CDR2 comprising an amino acid sequence WMNPNSGNSSVQKFRG (SEQ ID NO: 585); and
   [0087] iii. a heavy chain CDR3 comprising an amino acid sequence

(SEQ ID NO: 843)
GGYTSSWRWYFDL
or
(SEQ ID NO: 844)
GGYTSSWSRWYFDL.

[0088] In various embodiments, the disclosure provides a method for treating cardiovascular disease (e.g., atherosclerosis or myocardial infarction) comprising administering an antigen binding protein, wherein the antigen binding protein:
[0089] a. is an antibody or antibody fragment;
[0090] b. binds to human TrigGering Receptor Expressed on Myeloid cells 1 (TREM-1) having the amino acid sequence set forth in SEQ ID NO: 2;
[0091] c. comprises a set of CDR sequences selected from:
   [0092] i) SEQ ID NO: 10 (LCDR1), SEQ ID NO: 11 (LCDR2), SEQ ID NO: 12 (LCDR3), SEQ ID NO: 16 (HCDR1), SEQ ID NO: 17 (HCDR2) and SEQ ID NO: 18 (HCDR3);
   [0093] ii) SEQ ID NO: 30 (LCDR1), SEQ ID NO: 31 (LCDR2), SEQ ID NO: 32 (LCDR3), SEQ ID NO: 36 (HCDR1), SEQ ID NO: 37 (HCDR2) and SEQ ID NO: 38 (HCDR3);
   [0094] iii) SEQ ID NO: 50 (LCDR1), SEQ ID NO: 51 (LCDR2), SEQ ID NO: 52 (LCDR3), SEQ ID NO: 56 (HCDR1), SEQ ID NO: 57 (HCDR2) and SEQ ID NO: 58 (HCDR3);
   [0095] iv) SEQ ID NO: 70 (LCDR1), SEQ ID NO: 71 (LCDR2), SEQ ID NO: 72 (LCDR3), SEQ ID NO: 76 (HCDR1), SEQ ID NO: 77 (HCDR2) and SEQ ID NO: 78 (HCDR3);
   [0096] v) SEQ ID NO: 90 (LCDR1), SEQ ID NO: 91 (LCDR2), SEQ ID NO: 92 (LCDR3), SEQ ID NO: 96 (HCDR1), SEQ ID NO: 97 (HCDR2) and SEQ ID NO: 98 (HCDR3);
   [0097] vi) SEQ ID NO: 110 (LCDR1), SEQ ID NO: 111 (LCDR2), SEQ ID NO: 112 (LCDR3), SEQ ID NO: 116 (HCDR1), SEQ ID NO: 117 (HCDR2) and SEQ ID NO: 118 (HCDR3);
   [0098] vii) SEQ ID NO: 130 (LCDR1), SEQ ID NO: 131 (LCDR2), SEQ ID NO: 132 (LCDR3), SEQ ID NO: 136 (HCDR1), SEQ ID NO: 137 (HCDR2) and SEQ ID NO: 138 (HCDR3);
   [0099] viii) SEQ ID NO: 150 (LCDR1), SEQ ID NO: 151 (LCDR2), SEQ ID NO: 152 (LCDR3), SEQ ID NO: 156 (HCDR1), SEQ ID NO: 157 (HCDR2) and SEQ ID NO: 158 (HCDR3);
   [0100] ix) SEQ ID NO: 170 (LCDR1), SEQ ID NO: 171 (LCDR2), SEQ ID NO: 172 (LCDR3), SEQ ID NO: 176 (HCDR1), SEQ ID NO: 177 (HCDR2) and SEQ ID NO: 178 (HCDR3);
   [0101] x) SEQ ID NO: 190 (LCDR1), SEQ ID NO: 191 (LCDR2), SEQ ID NO: 192 (LCDR3), SEQ ID NO: 196 (HCDR1), SEQ ID NO: 197 (HCDR2) and SEQ ID NO: 198 (HCDR3);
   [0102] xi) SEQ ID NO: 210 (LCDR1), SEQ ID NO: 211 (LCDR2), SEQ ID NO: 212 (LCDR3), SEQ ID NO: 216 (HCDR1), SEQ ID NO: 217 (HCDR2) and SEQ ID NO: 218 (HCDR3);
   [0103] xii) SEQ ID NO: 230 (LCDR1), SEQ ID NO: 231 (LCDR2), SEQ ID NO: 232 (LCDR3), SEQ ID NO: 236 (HCDR1), SEQ ID NO: 237 (HCDR2) and SEQ ID NO: 238 (HCDR3);
   [0104] xiii) SEQ ID NO: 250 (LCDR1), SEQ ID NO: 251 (LCDR2), SEQ ID NO: 252 (LCDR3), SEQ ID NO: 256 (HCDR1), SEQ ID NO: 257 (HCDR2) and SEQ ID NO: 258 (HCDR3);
   [0105] ix) SEQ ID NO: 270 (LCDR1), SEQ ID NO: 271 (LCDR2), SEQ ID NO: 272 (LCDR3), SEQ ID NO: 276 (HCDR1), SEQ ID NO: 277 (HCDR2) and SEQ ID NO: 278 (HCDR3); and
   [0106] xv) SEQ ID NO: 544 (LCDR1), SEQ ID NO: 545 (LCDR2), SEQ ID NO: 546 (LCDR3), SEQ ID NO: 547 (HCDR1), SEQ ID NO: 548 (HCDR2) and SEQ ID NO: 549 (HCDR3).

[0107] In various embodiments, the anti-TREM-1 antigen-binding protein comprises a set of CDR sequences selected from:
[0108] i) SEQ ID NO: 10 (LCDR1), SEQ ID NO: 11 (LCDR2), SEQ ID NO: 12 (LCDR3), SEQ ID NO: 16 (HCDR1), SEQ ID NO: 17 (HCDR2) and SEQ ID NO: 18 (HCDR3);
[0109] ii) SEQ ID NO: 30 (LCDR1), SEQ ID NO: 31 (LCDR2), SEQ ID NO: 32 (LCDR3), SEQ ID NO: 36 (HCDR1), SEQ ID NO: 37 (HCDR2) and SEQ ID NO: 38 (HCDR3);
[0110] iii) SEQ ID NO: 50 (LCDR1), SEQ ID NO: 51 (LCDR2), SEQ ID NO: 52 (LCDR3), SEQ ID NO: 56 (HCDR1), SEQ ID NO: 57 (HCDR2) and SEQ ID NO: 58 (HCDR3);
[0111] iv) SEQ ID NO: 90 (LCDR1), SEQ ID NO: 91 (LCDR2), SEQ ID NO: 92 (LCDR3), SEQ ID NO: 96 (HCDR1), SEQ ID NO: 97 (HCDR2) and SEQ ID NO: 98 (HCDR3);
[0112] v) SEQ ID NO: 130 (LCDR1), SEQ ID NO: 131 (LCDR2), SEQ ID NO: 132 (LCDR3), SEQ ID NO: 136 (HCDR1), SEQ ID NO: 137 (HCDR2) and SEQ ID NO: 138 (HCDR3);
[0113] vi) SEQ ID NO: 150 (LCDR1), SEQ ID NO: 151 (LCDR2), SEQ ID NO: 152 (LCDR3), SEQ ID NO: 156 (HCDR1), SEQ ID NO: 157 (HCDR2) and SEQ ID NO: 158 (HCDR3); or
[0114] vii) SEQ ID NO: 270 (LCDR1), SEQ ID NO: 271 (LCDR2), SEQ ID NO: 272 (LCDR3), SEQ ID NO: 276 (HCDR1), SEQ ID NO: 277 (HCDR2) and SEQ ID NO: 278 (HCDR3).

[0115] In various embodiments, the anti-TREM-1 antigen binding protein comprises a set of CDR sequences selected from SEQ ID NO: 30 (LCDR1), SEQ ID NO: 31 (LCDR2), SEQ ID NO: 32 (LCDR3), SEQ ID NO: 36 (HCDR1), SEQ ID NO: 37 (HCDR2) and SEQ ID NO: 38 (HCDR3); or SEQ ID NO: 90 (LCDR1), SEQ ID NO: 91 (LCDR2), SEQ ID NO: 92 (LCDR3), SEQ ID NO: 96 (HCDR1), SEQ ID NO: 97 (HCDR2) and SEQ ID NO: 98 (HCDR3).

[0116] In various embodiments, the disclosure provides a method for treating cardiovascular disease (e.g., atherosclerosis or myocardial infarction) comprising administering an anti-TREM-1 antigen binding protein, wherein the anti-TREM-1 antigen-binding protein comprises:
[0117] a. a light chain variable domain comprising an amino acid sequence selected from the group consisting of:
   [0118] i. a sequence at least 80% identical to an amino acid sequence selected from SEQ ID NOS: 21, 41, 61, 81, 101, 121, 141, 161, 181, 201, 221, 241, 261, 281 and 539;
   [0119] ii. a sequence encoded by a polynucleotide sequence that is at least 80% identical to a nucleic acid sequence selected from SEQ ID NOS: 19, 39, 59, 79, 99, 119, 139, 159, 179, 199, 219, 239, 259, 279, and 537;
   [0120] iii. a sequence encoded by a polynucleotide that hybridizes under moderately stringent conditions to the complement of a polynucleotide consisting of a nucleic acid sequence selected from SEQ ID NOS: 19, 39, 59, 79, 99, 119, 139, 159, 179, 199, 219, 239, 259, 279 and 537; and
[0121] b. a heavy chain variable domain comprising an amino acid sequence selected from the group consisting of:
   [0122] i. a sequence that is at least 80% identical to an amino acid sequence selected from SEQ ID NOS: 22, 42, 62, 82, 102, 122, 142, 162, 182, 202, 222, 242, 262, 282, and 540;
   [0123] ii. a sequence encoded by a polynucleotide sequence that is at least 80% identical to an amino acid sequence selected from SEQ ID NOS: 20, 40, 60, 80, 100, 120, 140, 160, 180, 200, 220, 240, 260, 280, and 2184; iii. a sequence encoded by a polynucleotide that hybridizes under moderately stringent conditions to the complement of a polynucleotide consisting of a nucleic sequence selected from SEQ ID NOS: 20, 40, 60, 80, 100, 120, 140, 160, 180, 200, 220, 240, 260, 280, and 538.

[0124] In various embodiments, the anti-TREM-1 antigen-binding protein comprises:
[0125] a. a light chain variable domain comprising an amino acid sequence selected from the group consisting of:
   [0126] i. a sequence at least 80% identical to an amino acid sequence selected from SEQ ID NOS: 21, 41, 61, 101, 141, 161, and 281;
   [0127] ii. a sequence encoded by a polynucleotide sequence that is at least 80% identical to a nucleic acid sequence selected from SEQ ID NOS: 19, 39, 59, 99, 139, 159, and 279;
   [0128] iii. a sequence encoded by a polynucleotide that hybridizes under moderately stringent conditions to the complement of a polynucleotide consisting of a nucleic acid sequence selected from SEQ ID NOS: 19, 39, 59, 99, 139, 159, and 279; and
[0129] b. a heavy chain variable domain comprising an amino acid sequence selected from the group consisting of:
   [0130] i. a sequence that is at least 80% identical to an amino acid sequence selected from SEQ ID NOS: 22, 42, 62, 102, 142, 162, and 282;
   [0131] ii. a sequence encoded by a polynucleotide sequence that is at least 80% identical to an amino acid sequence selected from SEQ ID NOS: 20, 40, 60, 100, 140, 160, and 280;
   [0132] iii. a sequence encoded by a polynucleotide that hybridizes under moderately stringent conditions to the complement of a polynucleotide consisting of a nucleic sequence selected from SEQ ID NOS: 20, 40, 60, 100, 140, 160, and 280.

[0133] In various embodiments, the anti-TREM-1 antigen-binding protein comprises:
[0134] a. a light chain variable domain comprising an amino acid sequence selected from the group consisting of:
   [0135] i. a sequence at least 80% identical to an amino acid sequence selected from SEQ ID NOS: 41 and 101;
   [0136] ii. a sequence encoded by a polynucleotide sequence that is at least 80% identical to a nucleic acid sequence selected from SEQ ID NOS: 39 and 99;
   [0137] iii. a sequence encoded by a polynucleotide that hybridizes under moderately stringent conditions to the complement of a polynucleotide consisting of a nucleic acid sequence selected from SEQ ID NOS: 39 and 99; and
[0138] b. a heavy chain variable domain comprising an amino acid sequence selected from the group consisting of:
   [0139] i. a sequence that is at least 80% identical to an amino acid sequence selected from SEQ ID NOS: 42 and 102;
   [0140] ii. a sequence encoded by a polynucleotide sequence that is at least 80% identical to an amino acid sequence selected from SEQ ID NOS: 40 and 100;
   [0141] iii. a sequence encoded by a polynucleotide that hybridizes under moderately stringent conditions to the complement of a polynucleotide consisting of a nucleic sequence selected from SEQ ID NOS: 40 and 100.

[0142] In various embodiments, the anti-TREM-1 antigen-binding protein comprises: i) a light chain variable domain sequence set out in SEQ ID NO: 21 and a heavy chain variable domain sequence set out in SEQ ID NO: 22;
[0143] i) a light chain variable domain sequence set out in SEQ ID NO: 41 and a heavy chain variable domain sequence set out in SEQ ID NO: 42;
[0144] ii) a light chain variable domain sequence set out in SEQ ID NO: 61 and a heavy chain variable domain sequence set out in SEQ ID NO: 62;
[0145] iii) a light chain variable domain sequence set out in SEQ ID NO: 81 and a heavy chain variable domain sequence set out in SEQ ID NO: 82;
[0146] iv) a light chain variable domain sequence set out in SEQ ID NO: 101 and a heavy chain variable domain sequence set out in SEQ ID NO: 102;
[0147] v) a light chain variable domain sequence set out in SEQ ID NO: 121 and a heavy chain variable domain sequence set out in SEQ ID NO: 122;
[0148] vi) a light chain variable domain sequence set out in SEQ ID NO: 161 and a heavy chain variable domain sequence set out in SEQ ID NO: 162;
[0149] vii) a light chain variable domain sequence set out in SEQ ID NO: 181 and a heavy chain variable domain set out in SEQ ID NO: 182;
[0150] viii) a light chain variable domain sequence set out in SEQ ID NO: 201 and a heavy chain variable domain set out in SEQ ID NO: 202;
[0151] x) a light chain variable domain sequence set out in SEQ ID NO: 221 and a heavy chain variable domain sequence set out in SEQ ID NO: 222;
[0152] xi) a light chain variable domain set out in SEQ ID NO: 241 and a heavy chain variable domain set out in SEQ ID NO: 242;
[0153] xii) a light chain variable domain sequence set out in SEQ ID NO: 261 and a heavy chain variable domain sequence set out in SEQ ID NO: 262;
[0154] xiii) a light chain variable domain sequence set out in SEQ ID NO: 281 and a heavy chain variable domain sequence set out in SEQ ID NO: 282; and
[0155] xv) a light chain variable domain sequence set out in SEQ ID NO: 539 and a heavy chain variable domain sequence set out in SEQ ID NO: 540.

[0156] In various embodiments, the anti-TREM-1 antigen-binding protein comprises:
[0157] i) a light chain variable domain sequence set out in SEQ ID NO: 21 and a heavy chain variable domain sequence set out in SEQ ID NO: 22;
[0158] ii) a light chain variable domain sequence set out in SEQ ID NO: 41 and a heavy chain variable domain sequence set out in SEQ ID NO: 42;
[0159] iii) a light chain variable domain sequence set out in SEQ ID NO: 61 and a heavy chain variable domain sequence set out in SEQ ID NO: 62;
[0160] iv) a light chain variable domain sequence set out in SEQ ID NO: 101 and a heavy chain variable domain sequence set out in SEQ ID NO: 102;
[0161] v) a light chain variable domain sequence set out in SEQ ID NO: 141 and a heavy chain variable domain sequence set out in SEQ ID NO: 142;
[0162] vi) a light chain variable domain sequence set out in SEQ ID NO: 161 and a heavy chain variable domain sequence set out in SEQ ID NO: 162; or
[0163] vii) a light chain variable domain sequence set out in SEQ ID NO: 281 and a heavy chain variable domain set out in SEQ ID NO: 282.

[0164] In various embodiments, the anti-TREM-1 antigen-binding protein comprises: a light chain variable domain sequence set out in SEQ ID NO: 4 and a heavy chain variable domain sequence set out in SEQ ID NO: 42; or a light chain variable domain sequence set out in SEQ ID NO: 101 and a heavy chain variable domain sequence set out in SEQ ID NO: 102.

[0165] In various embodiments, the amino acid sequences can be 80%, 85%, 90%, 91%, 92%, 93%, 94%, 95%, 96%, 97%, 98% or 99% identical to SEQ ID NOS: 22, 42, 62, 82, 102. 122, 142, 162, 182, 202, 222, 242, 262, 282, and 540, and SEQ ID NOS: 21, 41, 61, 81, 101, 121, 141, 161, 181, 201, 221, 241, 261, 281, and 539.

[0166] In various embodiments, the antigen binding protein comprises an amino acid sequence at least 90% identical to a heavy chain variable region amino acid sequence selected from SEQ ID NOS: 22, 42, 62, 82, 102. 122, 142, 162, 182, 202, 222, 242, 262, 282, and 540.

[0167] In various embodiments, the antigen-binding protein comprises an amino acid sequence at least 90% identical to a light chain variable region amino acid sequence set forth in SEQ ID NOS: 21, 41, 61, 81, 101, 121, 141, 161, 181, 201, 221, 241, 261, 281, and 539.

[0168] In various embodiments, the antigen binding protein comprises an amino acid sequence at least 90% identical to a heavy chain variable region amino acid sequence selected from SEQ ID NOS: 22, 42, 62, 102, 142, 162, and 282. In various embodiments, the antigen-binding protein comprises an amino acid sequence at least 90% identical to a light chain variable region amino acid sequence selected from SEQ ID NO: 21, 41, 61, 101, 141, 161, and 281.

[0169] In various embodiments, the antigen binding protein comprises an amino acid sequence at least 90% identical to a heavy chain variable region amino acid sequence selected from SEQ ID NOS: 42 and 102. In various embodiments, the antigen-binding protein comprises an amino acid sequence at least 90% identical to a light chain variable region amino acid sequence selected from SEQ ID NO: 41 and 101.

[0170] In various embodiments, one or more heavy chain framework amino acids of the anti-antigen-binding protein are replaced with corresponding amino acid(s) from another human antibody amino acid sequence. In various embodiments, one or more light chain framework amino acids of the antigen-binding protein are replaced with corresponding amino acid(s) from another human antibody amino acid sequence.

[0171] In some instances, a sequence disclosed herein may contain an N-terminal signal sequence useful for recombinant production. Contemplated herein are sequences of anti-TREM-1 antibodies lacking the signal sequences. Exemplary signal sequences include MDMRVPAQLLGLLLLWLRGARC; MAWALLLLTLLTQGTGSWASYEL, and nucleic acids encoding such signal sequences.

[0172] In various embodiments, the anti-TREM-1 antigen binding protein further comprises a human light chain constant region attached to said light chain variable region.

[0173] In various embodiments, the heavy chain constant region is selected from heavy chain constant regions of an IgG, IgM, IgA, IgD, IgE, fragments thereof, combinations thereof, and modifications thereof in which one to ten heavy chain framework amino acids are replaced with corresponding amino acid(s) from another human antibody amino acid sequence.

[0174] In various embodiments, the anti-TREM-1 antigen-binding protein described herein inhibits binding of a TREM-1 ligand to TREM-1.

[0175] Also contemplated is an antigen binding protein that competes for binding to a human TREM-1 protein having the sequence of SEQ ID NO: 2 with an anti-TREM-1 antigen binding protein as described herein.

[0176] In various embodiments, the antigen-binding protein is selected from the group consisting of a human antibody, a humanized antibody, a chimeric antibody, a monoclonal antibody, a recombinant antibody, a Fab, a F(ab′)2, a Fab2, a monovalent IgG, an scFv, an scFv-Fc, an IgG1 antibody, an IgG2 antibody, an IgG3 antibody, and an IgG4 antibody. In various embodiments, the anti-TREM-1 antigen-binding protein is an IgG2 antibody. In various embodiments, the anti-TREM-1 antigen-binding protein is an IgG1 antibody. In various embodiments, the IgG1 antibody is an IGg1z or IgG1z-SEFL2 antibody. In various embodiments, the antigen-binding protein is a monovalent IgG.

[0177] In various embodiments, the antigen-binding protein is a human antibody.

[0178] Also provided is an isolated nucleic acid molecule comprising a nucleotide sequence that encodes the heavy chain of an anti-TREM-1 antigen binding protein as described herein, an isolated nucleic acid molecule comprising a nucleotide sequence that encodes the light chain of an anti-TREM-1 antigen binding protein as described herein, and an isolated nucleic acid molecule comprising a nucleotide sequence that encodes the heavy chain and light chain of an anti-TREM-1 antigen binding protein as described herein.

[0179] In various embodiments, the antigen binding protein comprises an amino acid sequence at least 90% identical to a heavy chain variable region polynucleotide sequence selected from SEQ ID NOS: 20, 40, 60, 80, 100, 120, 140, 160, 180, 200, 220, 240, 260, 280 and 538. In various embodiments, the antigen-binding protein comprises an amino acid sequence at least 90% identical to a light chain variable region polynucleotide sequence set forth in SEQ ID NO: 19, 39, 59, 79, 99, 119, 139, 159, 179, 199, 219, 239, 259, 279 and 537.

[0180] In various embodiments, the antigen binding protein comprises an amino acid sequence at least 90% identical to a heavy chain variable region polynucleotide sequence selected from SEQ ID NOS: 20, 40, 60, 100, 140, 160, and 280. In various embodiments, the antigen-binding protein comprises an amino acid sequence at least 90% identical to a light chain variable region polynucleotide sequence selected from SEQ ID NO: 19, 39, 59, 99, 139, 159, and 279.

[0181] In various embodiments, the antigen binding protein comprises an amino acid sequence at least 90% identical to a heavy chain variable region polynucleotide sequence selected from SEQ ID NOS: 40 and 100. In various embodiments, the antigen-binding protein comprises an amino acid sequence at least 90% identical to a light chain variable region polynucleotide sequence selected from SEQ ID NO: 39 and 99.

[0182] Further contemplated is an expression vector comprising the nucleic acid molecules of an anti-TREM-1 antigen binding protein heavy and/or light chain as described herein operably linked to an expression control sequence.

[0183] The disclosure provides a recombinant host cell comprising the nucleic acid molecule comprising a nucleotide sequence encoding the heavy chain of an anti-TREM-1 antigen binding protein or antibody as described herein; or the nucleic acid molecule encoding the light chain or an anti-TREM-1 antibody as described herein; or the nucleic acid molecule encoding a heavy chain and light chain nucleic acid molecule of an anti-TREM-1 antibody as described herein; or the vector comprising the nucleic acid molecules encoding the heavy and/or light chain of an anti-TREM-1 antibody as described herein. In various embodiments, the host cell is a mammalian cell. In various embodiments, the host cell is a CHO cell.

[0184] Further provided is a method of using the host cell to produce an antigen-binding protein, comprising culturing the host cell and recovering said antigen-binding protein, and an antigen-binding protein produced by the method.

[0185] Also provided is a sterile pharmaceutical composition comprising the anti-TREM-1 antigen binding protein as described herein and a pharmaceutically acceptable carrier.

[0186] In various embodiments, the antigen binding protein further comprises a human heavy chain constant region attached to said heavy chain variable region of the antigen binding protein. In various embodiments, the antigen binding protein further comprises a human light chain constant region attached to said light chain variable region of the antibody.

[0187] In various embodiments, the antigen-binding moiety is selected from the group consisting of a human antibody, a humanized antibody, a chimeric antibody, a monoclonal antibody, a recombinant antibody, a Fab, a F(ab′)2, a Fab2, a monovalent IgG, an scFv, an scFv-Fc, an IgG1 antibody, an IgG2 antibody, an IgG3 antibody, and an IgG4 antibody. In various embodiments, the antigen-binding moiety is an IgG. In various embodiments, the antigen-binding moiety is an IgG2 antibody. In various embodiments, the antigen-binding moiety is an IgG1 antibody. In various embodiments of the antigen binding protein, the antibody is an IgG1z or IgG1z-SEFL2 antibody. In various embodiments, the antigen-binding moiety is a monovalent IgG. In various embodiments, the heavy chain constant region of the antigen-binding moiety is selected from heavy chain constant regions of an IgG, IgM, IgA, IgD, IgE, fragments thereof, combinations thereof, and modifications thereof in which one to ten heavy chain framework amino acids are replaced with corresponding amino acid(s) from another human antibody constant region.

[0188] In various embodiments, the antigen binding protein has the heavy and light chain pairs as set out in Table 7-8, Table 11 and Table 12.

[0189] Nucleic acid sequences of TREM-1 variant antibody heavy chain variable regions are set out in SEQ ID NOS: 284, 286, 288, 290, 292, 294, 296, 298, 300, 302, 304, 306, 308, 310, 312, 314, 316, 318, 320, 322, 324, 326, 328, 330, 332, 334, 336, 338, 340, 342, 344, 346, 348, 350, 352, 354, 356, 358, 360, 362, 364, 366, 368, 370, 372, 374, 376, 378, 380, 382, 384, 386, 388, 390, 392,394, 396, 398, 400, 402, 404, 406, and 408, and also set out in SEQ ID NOS: 412, 414, 416, 418, 420, 422, 424, 426, 428, 430, 432, 434, 436, 438, 440, 442, 444, 446, 448, 450, 452, 454, 456, 458, 460, 462, 464, 466, 468, 470, 472, 474, 476, 478, 480, 482, 484, 486, 488, 490, 492, 494, 496, 498, 500, 502, 504, 506, 508, 510, 512, 514, 516, 518, 520, 522, 524, 526, 528, 530, 532, 534, and 536; and TREM-1 variant antibody light chain variable regions nucleotide sequences are set out in SEQ ID NO: 778, 779, 780, 781, 782, 783, 784, 785, 786, 787, 788, 789, 790, 791, 792, 793, 794, 795, 796, 797, 798, 799, 800, 801, 802, 803, 804, 805, 806, 807, 808, 809, 810, 811, 812, 813, 814, 815, 816, 817, 818, 819, 820, 821, 822, 823, 824, 825, 826, 827, 828, 829, 830, 831, 832, 833, 834, 835, 836, 837, 838, 839, 840, and also set out in SEQ ID NO: 588, 590, 592, 594, 596, 598, 600, 602, 604, 606, 608, 610, 612, 614, 61, 618, 620, 622, 624, 626, 628, 630, 632, 634, 636, 638, 640, 642, 644, 646, 648, 650, 652, 654, 656, 658, 660, 662, 664, 666, 668, 670, 672, 674, 676, 678, 680, 682, 684, 686, 688, 690, 692, 694, 696, 698, 700, 702, 704, 706, 708, 710, and 712.

[0190] In various embodiments, one or more heavy chain framework amino acids of the antigen-binding protein are replaced with corresponding amino acid(s) from another human antibody amino acid sequence. In various embodiments, one or more light chain framework amino acids of the antigen-binding protein are replaced with corresponding amino acid(s) from another human antibody amino acid sequence.

[0191] In various embodiments, the anti-TREM-1 antigen binding protein further comprises a human light chain constant region attached to said light chain variable region.

[0192] In various embodiments, provided herein are variants of the TREM-1 antibody heavy chain and/or light chain variable regions. TREM-1 antibody heavy chain variable region variant sequences are set out in SEQ ID NO: 283, 285, 287, 289, 291, 293, 295, 297, 299, 301, 303, 305, 307, 309, 311, 313, 315, 317, 319, 321, 323, 325, 327, 329, 331, 333, 335, 337, 339, 341, 343, 345, 347, 349, 351, 353, 355, 357, 359, 361, 363, 365, 367, 369, 371, 373, 375, 377, 379, 381, 383, 385, 387, 389, 391, 393, 395, 397, 399, 401, 403, 405, 407, 409, 411, 413, 415, 417, 419, 421, 423, 425, 427, 429, 431, 433, 435, 437, 439, 441, 443, 445, 447, 449, 451, 453, 455, 457, 459, 461, 463, 465, 467, 469, 471, 473, 475, 477, 479, 481, 483, 485, 487, 489, 491, 493, 495, 497, 499, 501, 503, 505, 507, 509, 511, 513, 515, 517, 519, 521, 523, 525, 527, 529, 531, 533, 535, Table 7-8, Table 11, and Table 12.

[0193] TREM-1 antibody light chain variable region variant sequences are set out in SEQ ID NOS: 715-777, 587, 589, 591, 593, 595, 597, 599, 601, 603, 605, 607, 609, 611, 613, 615, 617, 619, 621, 623, 625, 627, 629, 631, 633, 635, 637, 639, 641, 643, 645, 647, 649, 651, 653, 655, 657, 659, 661, 663, 665, 667, 669, 671, 673, 675, 677, 679, 681, 683, 685, 687, 689, 691, 693, 695, 697, 699, 701, 703, 705, 707, 709, 711, Table 7-8, Table 11, and Table 12.

[0194] In various embodiments, the antigen-binding protein is a human antibody.

[0195] Also provided is an isolated nucleic acid molecule comprising a nucleotide sequence that encodes the heavy chain region of the antigen binding protein of as described herein, an isolated nucleic acid molecule comprising a nucleotide sequence that encodes the light chain region of the antigen binding protein of as described herein.

[0196] The disclosure provides an expression vector or vectors comprising the nucleic acid molecule or molecules encoding an antigen binding protein as described herein operably linked to an expression control sequence.

[0197] Also contemplated is a recombinant host cell comprising the nucleic acid molecule comprising an antigen binding protein as described herein, or the vector comprising said nucleic acid. In various embodiments, the host cell is a mammalian cell. In various embodiments, the host cell is a CHO cell. The disclosure provides a method of using the host cell described herein to produce an antigen binding protein, comprising culturing the host cell and recovering said antibody, and provides an antigen binding protein produced by the method.

[0198] The disclosure contemplates methods of treatment comprising administering a pharmaceutical composition comprising an anti-TREM-1 antigen binding protein or antigen binding fragment described herein.

[0199] In a related aspect, the disclosure provides a method of treating a cardiovascular disease (e.g., atherosclerosis or myocardial infarction) in a subject in a need thereof comprising administering an anti-TREM-1 antigen-binding protein as described herein or a composition comprising an anti-TREM-1 antigen binding protein as described herein.

[0200] Also contemplated is a composition comprising an anti-TREM-1 antigen binding protein or antigen-binding fragment as described herein for use in treating a cardiovascular disease (e.g., atherosclerosis or myocardial infarction). In various embodiments, the disclosure provides use of composition comprising an anti-TREM-1 antigen binding protein or antigen-binding fragment as described herein in preparation of a medicament for treating a cardiovascular disease (e.g., atherosclerosis or myocardial infarction).

[0201] In various embodiments, the cardiovascular disease is selected from the group consisting of myocardial infarction, non-alcoholic fatty liver disease (NAFLD), non-alcoholic steatohepatitis (NASH), heart failure, stroke (e.g., ischemic, hemorrhagic), atherosclerosis, coronary artery disease, peripheral vascular disease (e.g. peripheral artery disease), vulnerable plaque, acute coronary syndrome, cerebrovascular disease, cerebrovascular atherosclerosis, and obesity. In various embodiments the cardiovascular disease is myocardial infarction. In various embodiments, the cardiovascular disease is stroke (ischemic and/or hemorrhagic). In various embodiments, the cardiovascular disease is atherosclerosis. In various embodiments, the cardiovascular disease is NAFLD or NASH. In various embodiments, the cardiovascular disease is heart failure. In various embodiments, the cardiovascular disease is coronary artery disease. In various embodiments, the cardiovascular disease is peripheral vascular disease. In various embodiments, the cardiovascular disease is peripheral artery disease. In various embodiments, the cardiovascular disease is vulnerable plaque. In various embodiments, the cardiovascular disease is acute coronary syndrome. In various embodiments, the cardiovascular disease is cerebrovascular disease. In various embodiments, the cardiovascular disease is cerebrovascular atherosclerosis. In various embodiments, the cardiovascular disease is obesity.

[0202] In various embodiments, the treatment is administered intravenously or subcutaneously. In various embodiments, the treatment is administered once weekly, once every two weeks, once every three weeks, once every 4 weeks, once monthly, once every 3 months, or once every six months, or once yearly.

[0203] In various embodiments, the TREM-1 is human TREM-1 set out in SEQ ID NO: 2.

[0204] In various embodiments, the administration reduces one or more symptoms of cardiovascular disease selected from the group consisting of inflammatory cell migration to the site of injury, infiltration of myeloid cells into cardiac tissue, inflammatory cytokines in the microenvironment, tissue damage, reduction in foam cell formation, reduction in necrotic core size, reduction in scar formation, reduction in endothelial cell dysfunction, and/or reduction in thrombus formation.

[0205] In various embodiments, the methods comprise administering one or two additional therapeutic agents. In various embodiments, the additional therapeutic agents are selected from corticosteroids, NSAIDs, analgesics, immunosuppressive agents, anti-inflammatory agents, TNFα inhibitors, IL-12/IL-23 inhibitors, IL-17 and IFN-γ. Therapeutic agents (apart from the antigen binding protein), useful in cardiovascular disease include, but are not limited to, at least one cholesterol-lowering (serum and/or total body cholesterol) agent or an agent. In some embodiments, the agent increases the expression of LDLR, have been observed to increase serum HDL levels, lower LDL levels or lower triglyceride levels. Exemplary agents include, but are not limited to, statins (atorvastatin, cerivastatin, fluvastatin, lovastatin, mevastatin, pitavastatin, pravastatin, rosuvastatin, simvastatin), PCSK9 inhibitors (Repatha®, Praluent®, Leqvio®) nicotinic acid (Niacin) (NIACOR®, NIASPAN® (slow release niacin), SLO-NIACIN® (slow release niacin), Fibric acid (LOPIDO (gemfibrozil), TRICOR® (fenofibrate), Bile acid sequestrants (QUESTRAN® (cholestyramine), colesevelam (WELCHOL®), COLESTID® (colestipol), Cholesterol absorption inhibitors (Zetia (ezetimibe)), combining nicotinic acid with statin (ADVICOR® (LOVASTATIN and NIASPAN®). Combining a statin with an absorption inhibitor (VYTORIN® (ZOCOR® and ZETIA®) and/or lipid modifying agents like PCSK9 inhibitors. In some embodiments, the antigen binding protein is combined with PPAR gamma agonists, PPAR alpha/gamma agonists, squalene synthase inhibitors, cholesterylester transfer protein (CETP) inhibitors, anti-hypertensives, anti-thrombotics (aspirin) anti-diabetic agents (such as sulphonyl ureas, insulin, GLP-1 analogs, DDPIV inhibitors, SGL2 inhibitors), ApoB modulators, MTP inhibitors, Corlanor® (ivabradine) I(f) current Inhibitor, omecamtiv mecarbil cardiac myosin activator, OLPASIRAN (AMG890) (siRNA) that lowers lipoprotein(a), AMG 594 cardiac troponin activator, and/or arteriosclerosis obliterans treatments. Also contemplated is combination treatment with AMG 609, a small interfering RNA (siRNA) that targets a variant of patatin like phospholipase domain containing 3 (PNPLA3 I148M). The antigen binding protein may also be combined with other anti-inflammatory agents.

[0206] In various embodiments, the additional therapeutic agents are selected from the group consisting of one or more cholesterol-lowering agent, an agent that increases the expression of LDLR, statins (atorvastatin, cerivastatin, fluvastatin, lovastatin, mevastatin, pitavastatin, pravastatin, rosuvastatin, simvastatin), PCSK9 inhibitors (Repatha®, Praluent®, Leqvio®), nicotinic acid (Niacin) (NIACOR®, NIASPAN® (slow release niacin), SLO-NIACIN® (slow release niacin), Fibric acid (LOPID® (gemfibrozil), TRICOR® (fenofibrate), Bile acid sequestrants (QUESTRAN® (cholestyramine), colesevelam (WELCHOL®), COLESTID® (colestipol), Cholesterol absorption inhibitors (Zetia (ezetimibe)), combination of nicotinic acid with statin (ADVICOR® (LOVASTATIN and NIASPAN®), combination of a statin with an absorption inhibitor (VYTORIN (ZOCOR® and ZETIA®) and/or lipid modifying agents like PCSK9 inhibitors, PPAR gamma agonists, PPAR alpha/gamma agonists, squalene synthase inhibitors, cholesterylester transfer protein (CETP) inhibitors, anti-hypertensives, anti-thrombotics (aspirin) anti-diabetic agents (such as sulphonyl ureas, insulin, GLP-1 analogs, GIPR antagonists, DDPIV inhibitors, SGL2 inhibitors), ApoB modulators, MTP inhibitors, Corlanor® (ivabradine) I(f) current Inhibitor, omecamtiv mecarbil cardiac myosin activator, OLPASIRAN (AMG890) (siRNA) that lowers lipoprotein(a), AMG 594 cardiac troponin activator, AMG 609, AMG 171 (Growth Differential Factor 15 (GDF15) analog), AMG 133 (gastric inhibitory polypeptide receptor (GIPR) antagonist and glucagon-like peptide 1 (GLP-1) receptor agonist), and/or arteriosclerosis obliterans treatments.

[0207] It is understood that each feature or embodiment, or combination, described herein is a non-limiting, illustrative example of any of the aspects of the invention and, as such, is meant to be combinable with any other feature or embodiment, or combination, described herein. For example, where features are described with language such as “one embodiment”, “some embodiments”, “certain embodiments”, “further embodiment”, “specific exemplary embodiments”, and/or “another embodiment”, each of these types of embodiments is a non-limiting example of a feature that is intended to be combined with any other feature, or combination of features, described herein without having to list every possible combination. Such features or combinations of features apply to any of the aspects of the invention. Where examples of values falling within ranges are disclosed, any of these examples are contemplated as possible endpoints of a range, any and all numeric values between such endpoints are contemplated, and any and all combinations of upper and lower endpoints are envisioned.

[0208] The headings herein are for the convenience of the reader and not intended to be limiting. Additional aspects, embodiments, and variations of the invention will be apparent from the Detailed Description and/or Drawing and/or claims.

### BRIEF DESCRIPTION OF THE DRAWINGS

[0209] FIGS. 1A-1D show inhibition of ligand (PGLYRP1/PGN) mediated TREM-1 signaling by anti-human TREM-1 antibodies in human (FIGS. 1C-1D) or cyno (FIGS. 1A-1B) PBMCs as measured by TNF a release.

[0210] FIG. 2 shows inhibition by anti-human TREM-1 Fabs of ligand (PGLYRP1/PGN) mediated signaling in a cell line overexpressing human TREM-1/DAP12 as measured by phosphorylation of spleen tyrosine kinase (pSYK).

[0211] FIG. 3 shows the levels of PGLYRP1 in wild type and TREM-1 knockout mice after LPS injection.

### DETAILED DESCRIPTION

[0212] The present disclosure provides TREM-1 antibodies that block binding of TREM-1 ligands to the receptor. Antibodies in accordance with this disclosure show targeting to immune cells and modulation of cellular activity and cytokine response useful to treat cardiovascular diseases, such as atherosclerosis, stroke or myocardial infarction.

### Definitions

[0213] The term “polypeptide binding agent” or “antigen binding protein” refers to a polypeptide that is capable of specifically binding an antigen, e.g. a target or its signaling partner, or that is capable of binding an antigen with a measurable binding affinity. Examples of polypeptide binding agents include antibodies, peptibodies, polypeptides and peptides, optionally conjugated to other peptide moieties or non-peptidic moieties. Antigens to which a polypeptide binding agent may bind include any proteinaceous or non-proteinaceous molecule that is capable of eliciting an antibody response, or that is capable of binding to a polypeptide binding agent with detectable binding affinity greater than non-specific binding. The antigen to which a modulating polypeptide binding agent binds may include a target, a signaling partner of a target, and/or a complex comprising the target and its signaling partner.

[0214] The term “antibody” is used in the broadest sense and includes fully assembled antibodies, tetrameric antibodies, monoclonal antibodies, polyclonal antibodies, multispecific antibodies (e.g., bispecific antibodies), antibody fragments that can bind an antigen (e.g., Fab′, F′(ab)2, Fv, single chain antibodies, diabodies), and recombinant peptides comprising the forgoing as long as they exhibit the desired biological activity. An “immunoglobulin” or “tetrameric antibody” is a tetrameric glycoprotein that consists of two heavy chains and two light chains, each comprising a variable region and a constant region. Antigen-binding portions may be produced by recombinant DNA techniques or by enzymatic or chemical cleavage of intact antibodies. Antibody fragments or antigen-binding portions include, inter alia, Fab, Fab′, F(ab′)2, Fv, domain antibody (dAb), complementarity determining region (CDR) fragments, CDR-grafted antibodies, single-chain antibodies (scFv), single chain antibody fragments, chimeric antibodies, diabodies, triabodies, tetrabodies, minibody, linear antibody; chelating recombinant antibody, a tribody or bibody, an intrabody, a nanobody, a small modular immunopharmaceutical (SMIP), an antigen-binding-domain immunoglobulin fusion protein, a camelized antibody, a VHH containing antibody, or a variant or a derivative thereof, and polypeptides that contain at least a portion of an immunoglobulin that is sufficient to confer specific antigen binding to the polypeptide, such as one, two, three, four, five or six CDR sequences, as long as the antibody retains the desired biological activity.

[0215] The term “monovalent IgG” as used herein refers to an IgG in which a single antigen-binding fragment (Fab) is fused to a complete constant domain fragment (Fc) engineered to heterodimerize through mutations in the C_{H}3 domain within the Fc. A monovalent IgG is also known as a “one armed” antibody.

[0216] “Monoclonal antibody” refers to an antibody obtained from a population of substantially homogeneous antibodies, i.e., the individual antibodies comprising the population are identical except for possible naturally occurring mutations that may be present in minor amounts.

[0217] “Antibody variant” as used herein refers to an antibody polypeptide sequence that contains at least one amino acid substitution, deletion, or insertion in the variable region of the natural antibody variable region domains. Variants may be substantially homologous or substantially identical to the unmodified antibody.

[0218] An “isolated” antibody is one that has been identified and separated and recovered from a component of its natural environment. Contaminant components of its natural environment are materials that would interfere with diagnostic or therapeutic uses for the antibody, and may include enzymes, hormones, and other proteinaceous or non-proteinaceous solutes. In preferred embodiments, the antibody will be purified (1) to greater than 95% by weight of antibody as determined by the Lowry method, and most preferably more than 99% by weight, (2) to a degree sufficient to obtain at least 15 residues of N-terminal or internal amino acid sequence by use of a spinning cup sequenator, or (3) to homogeneity by SDS-PAGE under reducing or nonreducing conditions using Coomassie blue or, preferably, silver stain, or HPLC methods. Isolated antibody includes the antibody in situ within recombinant cells since at least one component of the antibody's natural environment will not be present. Ordinarily, however, isolated antibody will be prepared by at least one purification step.

[0219] “Heavy chain variable region” as used herein refers to the region of the antibody molecule comprising at least one complementarity determining region (CDR) of said antibody heavy chain variable domain. The heavy chain variable region may contain one, two, or three CDR of said antibody heavy chain.

[0220] “Light chain variable region” as used herein refers to the region of an antibody molecule, comprising at least one complementarity determining region (CDR) of said antibody light chain variable domain. The light chain variable region may contain one, two, or three CDR of said antibody light chain, which may be either a kappa or lambda light chain depending on the antibody.

[0221] As used herein, an antibody that “specifically binds” is “antigen specific”, is “specific for” antigen target or is “immunoreactive” with an antigen refers to an antibody or polypeptide binding agent of the invention that binds an antigen with greater affinity than other antigens of similar sequence. In one aspect, the antigen binding protein of the invention, or fragments, variants, or derivatives thereof, will bind with a greater affinity to human antigen as compared to its binding affinity to similar antigens of other, i.e., non-human, species, but polypeptide binding agents that recognize and bind orthologs of the target are within the scope of the invention.

[0222] The term “epitope” refers to that portion of any molecule capable of being recognized by and bound by a selective binding agent at one or more of the antigen binding regions. Epitopes usually consist of chemically active surface groupings of molecules, such as, amino acids or carbohydrate side chains, and have specific three-dimensional structural characteristics as well as specific charge characteristics. Epitopes as used herein may be contiguous or non-contiguous.

[0223] The term “derivative” when used in connection with polypeptide binding agents and polypeptides of the invention refers to polypeptides chemically modified by such techniques as ubiquitination, conjugation to therapeutic or diagnostic agents, labeling (e.g., with radionuclides or various enzymes), covalent polymer attachment such as PEGylation (derivatization with polyethylene glycol) and insertion or substitution by chemical synthesis of amino acids such as ornithine, which do not normally occur in human proteins. Derivatives retain the binding properties of underivatized molecules of the invention.

[0224] A “linker,” as used herein, refers to a peptide that links two polypeptides. A linker can be from 1-80 amino acids in length. In some embodiments, a linker can be 2-40, 3-40, 3-30, or 3-20 amino acids long. In some embodiments, a linker can be a peptide of 18, 17, 16, 15, 14, 13, 12, 11, 10, 9, 8, 7, 6, 5, 4 or 3 amino acids long. In other embodiments, a linker can be 3-25, 3-18, 5-20, 6-18, or 10-20 amino acids long. In other embodiments, a linker can be about, 2,3,4,5, 6, 7, 8, 9, 10, 11, 12, 13, 14, 15, 16, 17, 18, 19, 20, 21, 22, 23, 24, 25, 26, 27, 28, 29, or 30 amino acids long. In many cases, linkers lack free cysteine residues (i.e. and are therefore not involved in disulfide bonds) and also do not contain N-glycosylation sites (that is, Asn-Xxx-Ser/Thr, where X can be any amino acid except proline). In certain embodiments, peptide having the sequence G3SG2 or G4S is a linker between an anti-TREM-1 antigen binding protein and an IL-10 mutein. Examples of other suitable linkers include G2, G3, G3S, G3P, G3Q, and G5, among many others. Each capital letter in the foregoing linkers refers to the conventional one-letter code for an amino acid and each number refers to the number of tandem repeats of the amino acid in the linker. For example, “G3SG2” refers to a linker having the sequence Gly-Gly-Gly-Ser-Gly-Gly. “G4S” refers to a linker having the sequence Gly-Gly-Gly-Gly-Ser.

[0225] A “therapeutically effective amount” of a drug used to treat a disease is an amount that can reduce the severity of a disease, reduce the severity of one or more symptoms associated with the disease or its treatment, or delay the onset of more serious symptoms or a more serious disease that can occur with some frequency following the treated condition.

[0226] “Treatment” of any disease mentioned herein encompasses an alleviation of at least one symptom of the disease, a reduction in the severity of the disease, or the delay or prevention of disease progression to more serious symptoms that may, in some cases, accompany the disease or lead to at least one other disease. Treatment need not mean that the disease is totally cured. A useful therapeutic agent needs only to reduce the severity of a disease, reduce the severity of one or more symptoms associated with the disease or its treatment, or delay the onset of more serious symptoms or a more serious disease that can occur with some frequency following the treated condition.

[0227] “Subject” encompasses mammals and non-mammals. Examples of mammals include, but are not limited to, any member of the mammalian class: humans, non-human primates such as chimpanzees, and other apes and monkey species; farm animals such as cattle, horses, sheep, goats, swine; domestic animals such as rabbits, dogs, and cats; laboratory animals including rodents, such as rats, mice and guinea pigs, and the like. Examples of non-mammals include, but are not limited to, birds, fish, and the like. The term does not denote a particular age or gender.

[0228] “Myeloid cell” as used herein refers to subgroup of immune cells derived from blood progenitor cells of the myeloid lineage, and include granulocytes, monocytes, macrophages, dendritic cells (DCs). Myeloid cells serve an important function in protective immunity, often having phagocytic and antigen presenting cell (APC) functions. See e.g., de Kleer et al., Front. Immunol., 5:423, 2014.

### Antigen Binding Proteins and Antibodies

[0229] Immunoglobulin variable domains exhibit the same general structure of relatively conserved framework regions (FR) joined by three hypervariable regions or CDRs. From N-terminus to C-terminus, both light and heavy chains comprise the domains FR1, CDR1, FR2, CDR2, FR3, CDR3 and FR4. The assignment of amino acids to each domain is in accordance with the definitions of Kabat Sequences of Proteins of Immunological Interest (National Institutes of Health, Bethesda, Md. (1987 and 1991)), or Chothia & Lesk, J. Mol. Biol. 196:901-917, 1987; Chothia et al., Nature 342:878-883, 1989.

[0230] The hypervariable region of an antibody refers to the CDR amino acid residues of an antibody which are responsible for antigen-binding. The hypervariable region comprises amino acid residues from a CDR [e.g., residues 24-34 (L1), 50-56 (L2) and 89-97 (L3) in the light chain variable domain and 31-35 (H1), 50-65 (H2) and 95-102 (H3) in the heavy chain variable domain as described by Kabat et al., Sequences of Proteins of Immunological Interest, 5th Ed. Public Health Service, National Institutes of Health, Bethesda, Md. (1991)] and/or those residues from a hypervariable loop (e.g., residues 26-32 (L1), 50-52 (L2) and 91-96 (L3) in the light chain variable domain and 26-32 (H1), 53-55 (H2) and 96-101 (H3) in the heavy chain variable domain as described by [Chothia et al., J. Mol.Biol. 196:901-917 (1987)]. CDRs have also been identified and numbered according to ImMunoGenTics (IMGT) numbering (Lefranc, M.-P., The Immunologist, 7, 132-136 (1999); Lefranc, M.-P. et al., Dev. Comp. Immunol., 27, 55-77 (2003), which describes the CDR locations in the light and heavy chain variable domains as follows: CDR1, approximately residues 27 to 38; CDR2, approximately residues 56 to 65; and, CDR3, approximately residues 105 to 116 (germline) or residues 105 to 117 (rearranged). In one embodiment, it is contemplated that the CDRs are located at approximately residues 26-31 (L1), 49-51 (L2) and 88-98 (L3) in the light chain variable domain and approximately residues 26-33 (H1), 51-58 (H2) and 97-110 (H3) in the heavy chain variable domain of an antibody heavy or light chain of approximately similar length to those disclosed herein. However, one of skill in the art understands that the actual location of the CDR residues may vary from the projected residues described above when the sequence of the particular antibody is identified. CDRs that are assigned with sequence identifiers disclosed herein are defined following Kabat methodology (Kabat and Wu, 1991) and are numbered using Amgen Reference numbering. Amgen Reference numbering is a structurally based numbering system built upon the Honegger and Plückthun numbering system for antibody variable regions described in Honegger and Pluckthun (J Mol Biol. 309(3):657-70, 2001). In various embodiments, an engineered IgG1 antibody is contemplated. In various embodiment, the antibody is an IgG1z or IgG1z-SEFL2 antibody as described herein.

[0231] Additionally, CDRs may be defined according to the accumulation of both Kabat and Chothia, AbM, Contact, North, Martin, and/or conformational definitions or any method of CDR determination well known in the art. AbM definition of CDRs is a compromise between Kabat and Chothia and uses Oxford Molecular's AbM antibody modeling software (Accelrys®). The “contact” definition of CDRs is based on observed antigen contacts, set forth in MacCallum et al., 1996, J. Mol. Biol., 262:732-745. The “conformational” definition of CDRs is based on residues that make enthalpic contributions to antigen binding (see, e.g., Makabe et al., 2008, J. Biol. Chem., 283:1 156-1 166). North has identified canonical CDR conformations using a different preferred set of CDR definitions (North et al., 2011, J. Mol. Biol. 406: 228-256). In another approach, referred to herein as the “conformational definition” of CDRs, the positions of the CDRs may be identified as the residues that make enthalpic contributions to antigen binding (Makabe et al., 2008, J Biol. Chem. 283:1 156-1 166). Martin definition (also called enhanced Chothia definition) combines the Kabat and Chothia definitions and differs from them only in the heavy chain, where CDR-H1 includes all residues of Kabat and Chothia while CDR-H2 is seven residues shorter than that defined by Kabat (Martin, Bioinformatics tools for antibody engineering. Handbook of Therapeutic Antibodies. Weinheim: Wiley-VCH Verlag GmbH; (2008). p. 95-117; see also the database maintained by the Institute of Structural and Molecular Biology at the University College London, http://www.bioinf.org.uk/abs/#cdrid). Still other CDR boundary definitions may not strictly follow one of the above approaches, but will nonetheless overlap with at least a portion of the Kabat CDRs, although they may be shortened or lengthened in light of prediction or experimental findings that particular residues or groups of residues or even entire CDRs do not significantly impact antigen binding. For example, “combined” CDRs may also be used. As used herein, a CDR may refer to CDRs defined by any approach known in the art, including combinations of approaches. The methods used herein may utilize CDRs defined according to any of these approaches. For any given embodiment containing more than one CDR, the CDRs (or other residue of the antibody) may be defined in accordance with any of Kabat, Chothia, North, AbM, Contact, IMGT, Martin, combined Kabat and Chothia, and/or conformational definitions.

[0232] For example, the following Table shows several commonly used definitions of CDRs (for convenience, residue numbering according to Kabat numbering instead of Amgen reference numbering)

| Loop | Kabat | AbM | Chothia¹ | Contact² | IMGT |
|---|---|---|---|---|---|
| L1 | L24-L34 | L24-L34 | L26-L32 | L30-L36 | L27-L32 |
| L2 | L50-L56 | L50-L56 | L50-L52 | L46-L55 | L50-L51 |
| L3 | L89-L97 | L89-L97 | L91-L96 | L89-L96 | L89-L97 |
| H1 | H31-H35B | H26-H35B | H26-H32 . . . 34 | H30-H35B | H26-H35B |
| | (Kabat Numbering)³ | | | | |
| H1 | H31-H35 | H26-H35 | H26-H32 | H30-H35 | H26-H33 |
| | (Chothia Numbering) | | | | |
| H2 | H50-H65 | H50-H58 | H52-H56 | H47-H58 | H51-H56 |
| H3 | H95-H102 | H95-H102 | H96-H101 | H93-H101 | H93-H102 |

¹Some of these definitions (particularly for Chothia loops) vary depending on the individual publication examined. Some papers describe Chothia CDRs as: CDR-L1: L24-34; CDR-L2: L50-56; CDR-L3: L89-97; CDR-H1: H26-32; CDR-H2: H52-56; CDR-H3: H95-102.
²Any of the numbering schemes can be used for these CDR definitions, except the contact definition uses the Chothia or Martin (Enhanced Chothia) definition.
³The end of the Chothia CDR-H1 loop when numbered using the Kabat numbering convention varies between H32 and H34 depending on the length of the loop. (This is because the Kabat numbering scheme places the insertions at H35A and H35B.)

[0233] Framework region (or FR) residues are those variable domain residues other than the hypervariable region residues.

[0234] As described below, antibodies, including monoclonal, human, humanized, and other antibodies described herein, contemplated herein are typically generated recombinantly or through other methods of manipulating the genetic code in vitro or in vivo, and are therefore not necessarily reflective of a particular antibody that is found in nature.

### Anti-TREM-1 Antigen Binding Proteins

[0235] Previous studies to characterize TREM-1 signaling utilized agonistic antibodies of TREM-1 to mimic ligand activation of the receptor (Tessarz et al., Immunol Lett 116(2):111-6, 2008; Vandestienne et al., J Clin Invest 131(2):e142468, 2021). Decoy peptides have also been attempted to modulate TREM-1 activity (see e.g., International Patent Publication No. WO2014037565A).

[0236] The present disclosure encompasses use of amino acid molecules encoding target specific antibodies. The anti-TREM-1 antigen binding proteins, described herein, differentially modulate interaction of human TREM-1 and its ligands.

[0237] In some embodiments, an antigen binding protein is provided that comprises a polypeptide having an amino acid sequence at least about 65%, 70%, 75%, 80%, 81%, 82%, 83%, 84%, 85%, 86%, 87%, 88%, 89%, 90%, 91%, 92%, 93%, 94%, 95%, 96%, 97%, 98%, 99% or more identical to the heavy chain variable region set out in SEQ ID NOs: 22, 42, 62, 82, 102, 122, 142, 162, 182, 202, 222, 242, 262, 282, and 540 and/or an amino acid sequence an amino acid sequence at least about 65%, 70%, 75%, 80%, 81%, 82%, 83%, 84%, 85%, 86%, 87%, 88%, 89%, 90%, 91%, 92%, 93%, 94%, 95%, 96%, 97%, 98%, 99% or more identical to the light chain variable region set out in SEQ ID NOs: 21, 41, 61, 81, 101, 121, 141, 161, 181, 201, 221, 241, 261, 281 and 539, the antibody further comprising at least one, two, three, four, five or all of HCDR1, HCDR2, HCDR3, LCDR1, LCDR2 or LCDR3. In some embodiments, the amino acid sequence with percentage identity to the light chain variable region may comprise one, two or three of the light chain CDRs. In other embodiments, the amino acid sequence with percentage identity to the heavy chain variable region may comprise one, two, or three of the heavy chain CDRs.

[0238] In another embodiment, an antigen binding protein is provided that comprises a polypeptide having an amino acid sequence at least about 65%, 70%, 75%, 80%, 81%, 82%, 83%, 84%, 85%, 86%, 87%, 88%, 89%, 90%, 91%, 92%, 93%, 94%, 95%, 96%, 97%, 98%, 99% or more identical to all three HCDRs in the heavy chain variable region of an antibody sequence set out above or the CDRs: heavy chain CDR1 sequence set out in SEQ ID NO: 16, 36, 56, 76, 96, 116, 136, 156, 176, 196, 216, 236, 256, 276, and 550; heavy chain CDR2 sequence set out in SEQ ID NO: 17, 37, 57, 77, 97, 117, 137, 157, 177, 197, 217, 237, 257, 277, and 551; and heavy chain CDR3 sequence set out in SEQ ID NO: 18, 38, 58, 78, 98, 118, 138, 158, 178, 198, 218, 238, 258, 278, and 552.

[0239] In a related embodiment, an antigen binding protein is provided that comprises a polypeptide having an amino acid sequence at least about 65%, 70%, 75%, 80%, 81%, 82%, 83%, 84%, 85%, 86%, 87%, 88%, 89%, 90%, 91%, 92%, 93%, 94%, 95%, 96%, 97%, 98%, 99% or more identical to the all three LCDRs in the light chain variable region of an antibody sequence set out above or the CDRs: light chain CDR1 sequence set out in SEQ ID NO: 10, 30, 50, 70, 90, 110, 130, 150, 170, 190, 210, 230, 250, 270, and 544; light chain CDR2 sequence set out in SEQ ID NOS: 11, 31, 51, 71, 91, 111, 131, 151, 171, 191, 211, 231, 251, 271, and 545; light chain CDR3 sequence set out in SEQ ID NO: 12, 32, 52, 72, 92, 112, 132, 152, 172, 192, 212, 232, 252, 272, and 546.

[0240] It is contemplated that the antibodies of the disclosure may have one, or two or more amino acid substitutions in the CDR regions of the antibody, e.g., non-conservative or conservative substitutions. Also contemplated are consensus sequences of the TREM-1 antibody heavy and light chain CDRs and/or variable region sequences disclosed herein. For example, TREM-1 antibodies can comprise the following sequences. In various embodiments, the TREM-1 antibody comprises an antigen binding domain comprising a sequence having a light chain variable region comprising a LCDR1 amino acid sequence selected from the group consisting of: X₁ASQSX₂X₃X₄NLA (SEQ ID NO: 553), wherein X₁ is R or Q, wherein X₂ is V or I, wherein X₃ is N or S, and wherein X₄ is S, H, I, V or A; QASX₁DIX₂X₃X₄LN (SEQ ID NO: 558), wherein X₁ is R or Q, wherein X₂ is R, S, N or F, wherein X₃ is K or N, and wherein X₄ is H, Y or D; RASQSVNSNLA (SEQ ID NO: 566); QASQDIRKHLN (SEQ ID NO: 567); RASQDISSNLN (SEQ ID NO: 568); QASQDIHLN (SEQ ID NO: 569); RASQGIRKWLA (SEQ ID NO: 570) or RASQSVNSNLA (SEQ ID NO: 571) and SGDKLGERVS (SEQ ID NO: 572).

[0241] In various embodiments, the TREM-1 antibody comprises an antigen binding domain comprising a sequence having a light chain variable region comprising a LCDR2 amino acid sequence selected from the group consisting of GAX₁X₂RAT (SEQ ID NO: 554), wherein X₁ is S or Y, and wherein X₂ is T or I; an amino acid sequence X₁X₂X₃X₄LET (SEQ ID NO: 560), wherein X₁ is D, G or H, wherein X₂ is A, V or T, wherein X₃ is S, A or Y, and wherein X₄ is T or N; GASTRAT (SEQ ID NO: 573); DASNLET (SEQ ID NO: 574); and AASRLQS (SEQ ID NO: 575).

[0242] In various embodiments, the TREM-1 antibody comprises an antigen binding domain comprising a sequence having a light chain variable region comprising a LCDR3 amino acid sequence selected from the group consisting of QX₁X₂X₃X₄X₅X₆PX₇T (SEQ ID NO: 555); wherein X₁ is Q, H or E, wherein X₂ is F or Y, wherein X₃ is K, Y or I, wherein X₄ is N, T, L, I, or M; wherein X₅ is W, F, H or Y, wherein X₆ is absent or P; wherein X₇ is W, N, Y, H or L; QX₁YX₃X₄X₅PX₆T (SEQ ID NO: 561), wherein X₁ is Q or H, wherein X₂ is D, A or G, wherein X₃ is N or K; wherein X₄ is L or I, and wherein X₅ is I or L; QQFKNWPPT (SEQ ID NO: 576); QHYDNLPIT (SEQ ID NO: 577); LQAHGFPWT (SEQ ID NO: 578); QQYDNLPLT (SEQ ID NO: 579) and QFWPPWT (SEQ ID NO: 580).

[0243] In various embodiments, the TREM-1 antibody comprises an antigen binding domain comprising a sequence having a heavy chain variable region comprising a HCDR1 amino acid sequence selected from the group consisting of X₁X₂X₃MX₄ (SEQ ID NO: 556), wherein X₁ is A, R, T or S, wherein X₂ is Y or N, wherein X₃ is A or W, and wherein X₄ is S or N; a sequence X₁YDIN (SEQ ID NO: 563), wherein X₁ is R or S; GYYX₁H, wherein X₁ is M or I; AYAMS (SEQ ID NO: 581); RYDIN (SEQ ID NO: 582); and SYWMS (SEQ ID NO: 583).

[0244] In various embodiments, the TREM-1 antibody comprises an antigen binding domain comprising a sequence having a heavy chain variable region comprising a HCDR2 amino acid sequence selected from the group consisting of X₁X₂X₃X₄X₅X₆ X₇ Xₐ X₉YYX₁₀X₁₁X₁₂VKG (SEQ ID NO: 559), wherein X₁ is T, E, or S, wherein X₂ is absent or is M, V, or I, wherein X₃ is S, R or K, wherein X₄ is G or Q, wherein X₅ is S, D or H, wherein X₆ is G, S L, or A, wherein X₇ is S, G, or R, wherein X₈ is T, S, P or E, wherein X₉ is T or I, wherein X₁₀ is A or V, wherein X₁₁ is D or E, and wherein X₁₂ is S or A; X₁X₂NPX₃X₄GX₅X₆GX₇X₈ X₉X₁₀FX₁₁X₁₂ (SEQ ID NO: 564), wherein X₁ is W or R, wherein X₂ is M or L, wherein X₃ is N, Q, or K, wherein X₄ is S, A, or R, wherein X₅ is N, or Q, wherein X₆ is S, A, or T, wherein X₇ is S, Q, or Y, wherein X₈ is V or T, wherein X₉ is Q or K, wherein X₁₀ is K or N, wherein X₁₁ is R or Q, and wherein X₁₂ is G or D; TSGSGSTTYYADSVKG (SEQ ID NO: 584); WMNPNSGNSSVQKFRG (SEQ ID NO: 585); NIKQDGSEEYYVDSVKG (SEQ ID NO: 586); and TSGSGTYYADSVKG (SEQ ID NO: 841).

[0245] In various embodiments, the TREM-1 antibody comprises an antigen binding domain comprising a sequence having a heavy chain variable region comprising a HCDR3 amino acid sequence selected from the group consisting of X₁X₂X₃X₄X₅X₆ X₇ F X₈YYX₉ (SEQ ID NO: 557), wherein X₁ is V, E, A or G, wherein X₂ is A, F, Y or G, wherein X₃ is G, S, Y or W, wherein X₄ is S or R, wherein X₅ is absent or is N, wherein X₆ is F, S, Y, or absent, wherein X₇ is L or F or absent, wherein Xₐ is D or E, and wherein X₉ is Y, H or S; X₁X₂X₃X₄ X₅X₆ X₇X₈ X₉X₁₀X₁₁X₁₂FX₁₃X₁₄ (SEQ ID NO: 565); wherein X₁ is G, L or R, wherein X₂ is G, I, or R, wherein X₃ is Y, R, I, G, or A, wherein X₄ is T, S, Y, or V, wherein X₅ is S or Y, wherein X₆ is S, A, I, or R, wherein X₇ is W, A, or S, wherein X₈ is absent or is S, wherein X₉ is absent or is F, W, or Y, wherein X₁₀ is R, S, H, K, or E, wherein X₁₁ is W, H, Y, or F, wherein X₁₂ is Y, V, A, or S, wherein X₁₃ is D or Q, and wherein X₁₄ is L, Y, I, or H; VAGSNFLFDY (SEQ ID NO: 842); GGYTSSWRWYFDL (SEQ ID NO: 843); GGYTSSWSRWYFDL (SEQ ID NO: 844); and DYGDSFDY (SEQ ID NO: 845).

[0246] In a related embodiment, the residues of the framework are altered. The heavy chain framework regions which can be altered lie within regions designated H-FR1, H-FR2, H-FR3 and H-FR4, which surround the heavy chain CDR residues, and the residues of the light chain framework regions which can be altered lie within the regions designated L-FR1, L-FR2, L-FR3 and L-FR4, which surround the light chain CDR residues. An amino acid within the framework region may be replaced, for example, with any suitable amino acid identified in a human framework or human consensus framework. It is further contemplated that the framework regions may be altered, but the antigen binding protein or antibodies described herein retain the CDRs, LCDR1-3 and/or HCDR-3, of the parent antibodies.

[0247] Antibody fragments comprise a portion of an intact full length antibody, preferably an antigen binding or variable region of the intact antibody. Examples of antibody fragments include Fab, Fab′, F(ab′)2, Fcab, and Fv fragments; diabodies; linear antibodies; single-chain antibody molecules (e.g., scFv); multispecific antibody fragments such as bispecfic, trispecific, etc. antibodies (e.g., diabodies, triabodies, tetrabodies); minibody; chelating recombinant antibody; tribodies or bibodies; intrabodies; nanobodies; binding-domain immunoglobulin fusion proteins; camelized antibodies; VHH containing antibodies; and other polypeptides formed from antibody fragments. See for example Holliger & Hudson, 2005 Nat. Biotech. 23:1126-36; Eyer & Hruska, Veterinarni Medicina 57:439-513, 2012.

[0248] The antigen binding compounds of the present disclosure preferably retain binding affinity of 10⁻⁸, 10⁻¹, 10⁻¹⁰, 10⁻¹¹, 10⁻¹², 10⁻¹³, 10⁻¹⁴, 10⁻¹⁵ M or less for TREM-1, as measured by surface plasmon resonance or KinexA. The antigen binding compounds of the present disclosure have binding affinity from TREM-1 from 10⁻⁹ to 10⁻¹², or 10⁻¹⁰ to 10⁻¹³, or 10⁻¹⁰ to 10⁻¹⁵ M. The SPR assay is carried out using standard methods, for example, at 25° C. (room temperature).

[0249] In various embodiments, the antibody is an IgG1 antibody. In certain embodiments, the antibody is an IgG1z antibody.

[0250] Examples of full length antibodies that bind TREM-1 are provided herein having the heavy chain amino acid sequences set out in SEQ ID NOS: 6, 26, 46, 66, 86, 106, 126, 146, 166, 186, 206, 226, 246, 266, and 540; and the light chain amino acid sequences set out in SEQ ID NOS: 5, 25, 45, 65, 85, 105, 125, 145, 165, 185, 205, 225, 245, 265, and 539.

[0251] In various embodiments, the TREM-1 antigen-binding protein is selected from the group consisting of a human antibody, a humanized antibody, a chimeric antibody, a monoclonal antibody, a recombinant antibody, a Fab, a F(ab′)2, a Fab2, a monovalent IgG, an scFv, an scFv-Fc, an IgG1 antibody, an IgG2 antibody, an IgG3 antibody, and an IgG4 antibody.

[0252] In various embodiments, the antigen-binding moiety is an IgG. In various embodiments, the antigen-binding moiety is an IgG2 antibody. In various embodiments, the antigen-binding moiety is an IgG1 antibody. In various embodiments, the antibody is an IgG1z antibody. In various embodiments, the antigen-binding moiety is a monovalent IgG. In various embodiments, the heavy chain constant region of the antigen-binding moiety is selected from heavy chain constant regions of an IgG, IgM, IgA, IgD, IgE, fragments thereof, combinations thereof, and modifications thereof in which one to ten heavy chain framework amino acids are replaced with corresponding amino acid(s) from another human antibody constant region.

[0253] In various embodiments, the antigen binding protein binds its antigen with a binding affinity of 10⁻⁸ M to 10⁻¹⁵ M or 10⁻⁸ M to 10⁻¹² M, or 10⁻⁸ M, 10⁻⁹ M, 10⁻¹⁰ M, 10⁻¹ M, 10⁻¹² M, 10⁻¹³ M, 10⁻¹⁴ M, or 10⁻¹⁵ M.

[0254] In various embodiments, the anti-TREM-1 antigen binding protein comprises:
[0255] a. a light chain variable domain comprising:
   [0256] i. a light chain CDR1 comprising an amino acid sequence selected from SEQ ID NOS: 10, 30, 50, 70, 90, 110, 130, 150, 170, 190, 210, 230, 250, 270, and 544;
   [0257] ii. a light chain CDR2 comprising an amino acid sequence selected from SEQ ID NOS: 11, 31, 51, 71, 91, 111, 131, 151, 171, 191, 211, 231, 251, 271, and 545;
   [0258] iii. a light chain CDR3 comprising an amino acid sequence selected from SEQ ID NOS: 12, 32, 52, 72, 92, 112, 132, 152, 172, 192, 212, 232, 252, 272, and 546; and
[0259] b. comprises a heavy chain variable domain comprising:
   [0260] i. a heavy chain CDR1 comprising an amino acid sequence selected from SEQ ID NOS: 16, 36, 56, 76, 96, 116, 136, 156, 176, 196, 216, 236, 256, 276, and 550;
   [0261] ii. a heavy chain CDR2 comprising an amino acid sequence selected from SEQ ID NOS: 17, 37, 57, 77, 97, 117, 137, 157, 177, 197, 217, 237, 257, 277, and 551; and
   [0262] iii. a heavy chain CDR3 comprising an amino acid sequence selected from SEQ ID NOS: 18, 38, 58, 78, 98, 118, 138, 158, 178, 198, 218, 238, 258, 278, and 552.

[0263] In various embodiments of the antigen binding protein,
[0264] a. the light chain CDR1 sequence is set out in SEQ ID NO: 10, 30, 50, 90, 130, 150, or 270;
[0265] b. the light chain CDR2 sequence is set out in SEQ ID NO: 11, 31, 51, 91, 131, 151, or 271;
[0266] c. the light chain CDR3 sequence is set out in SEQ ID NO: 12, 32, 52, 92, 132, 152, or 272
[0267] d. the heavy chain CDR1 sequence is set out in SEQ ID NO: 16, 36, 56, 96, 136, 156, or 276;
[0268] e. the heavy chain CDR2 sequence is set out in SEQ ID NO: 17, 37, 57, 97, 137, 157, or 277; and
[0269] f. the heavy chain CDR3 sequence is set out in SEQ ID NO: 18, 38, 58, 98, 138, 158, or 278.

[0270] In various embodiments of the antigen binding protein,
[0271] a. the light chain CDR1 sequence is set out in SEQ ID NO: 30 or 90;
[0272] b. the light chain CDR2 sequence is set out in SEQ ID NO: 31 or 91;
[0273] c. the light chain CDR3 sequence is set out in SEQ ID NO: 32 or 92;
[0274] d. the heavy chain CDR1 sequence is set out in SEQ ID NO: 36 or 096;
[0275] e. the heavy chain CDR2 sequence is set out in SEQ ID NO: 37 or 97; and
[0276] f. the heavy chain CDR3 sequence is set out in SEQ ID NOS: 38 or 98.

[0277] In various embodiments, the antigen binding protein comprises the heavy chain (HC) CDR-H1, CDR-H2, and CDR-H3 of SEQ ID NO:22, and the light chain (LC) CDR-L1, CDR-L2, and CDR-L3 of SEQ ID NO:21. In exemplary embodiments, the CDRs are defined according to Kabat, Chothia, AbM, contact, or IMGT.

[0278] In various embodiments, the antigen binding protein comprises the heavy chain (HC) CDR-H1, CDR-H2, and CDR-H3 of SEQ ID NO:42, and the light chain (LC) CDR-L1, CDR-L2, and CDR-L3 of SEQ ID NO:41. In exemplary embodiments, the CDRs are defined according to Kabat, Chothia, AbM, contact, or IMGT.

[0279] In various embodiments, the antigen binding protein comprises the heavy chain (HC) CDR-H1, CDR-H2, and CDR-H3 of SEQ ID NO:62, and the light chain (LC) CDR-L1, CDR-L2, and CDR-L3 of SEQ ID NO:61. In exemplary embodiments, the CDRs are defined according to Kabat, Chothia, AbM, contact, or IMGT.

[0280] In various embodiments, the antigen binding protein comprises the heavy chain (HC) CDR-H1, CDR-H2, and CDR-H3 of SEQ ID NO:82, and the light chain (LC) CDR-L1, CDR-L2, and CDR-L3 of SEQ ID NO:81. In exemplary embodiments, the CDRs are defined according to Kabat, Chothia, AbM, contact, or IMGT.

[0281] In various embodiments, the antigen binding protein comprises the heavy chain (HC) CDR-H1, CDR-H2, and CDR-H3 of SEQ ID NO:102, and the light chain (LC) CDR-L1, CDR-L2, and CDR-L3 of SEQ ID NO:101. In exemplary embodiments, the CDRs are defined according to Kabat, Chothia, AbM, contact, or IMGT.

[0282] In various embodiments, the antigen binding protein comprises the heavy chain (HC) CDR-H1, CDR-H2, and CDR-H3 of SEQ ID NO:122, and the light chain (LC) CDR-L1, CDR-L2, and CDR-L3 of SEQ ID NO:121. In exemplary embodiments, the CDRs are defined according to Kabat, Chothia, AbM, contact, or IMGT.

[0283] In various embodiments, the antigen binding protein comprises the heavy chain (HC) CDR-H1, CDR-H2, and CDR-H3 of SEQ ID NO:142, and the light chain (LC) CDR-L1, CDR-L2, and CDR-L3 of SEQ ID NO:141. In exemplary embodiments, the CDRs are defined according to Kabat, Chothia, AbM, contact, or IMGT.

[0284] In various embodiments, the antigen binding protein comprises the heavy chain (HC) CDR-H1, CDR-H2, and CDR-H3 of SEQ ID NO:162, and the light chain (LC) CDR-L1, CDR-L2, and CDR-L3 of SEQ ID NO:161. In exemplary embodiments, the CDRs are defined according to Kabat, Chothia, AbM, contact, or IMGT.

[0285] In various embodiments, the antigen binding protein comprises the heavy chain (HC) CDR-H1, CDR-H2, and CDR-H3 of SEQ ID NO:182, and the light chain (LC) CDR-L1, CDR-L2, and CDR-L3 of SEQ ID NO:181. In exemplary embodiments, the CDRs are defined according to Kabat, Chothia, AbM, contact, or IMGT.

[0286] In various embodiments, the antigen binding protein comprises the heavy chain (HC) CDR-H1, CDR-H2, and CDR-H3 of SEQ ID NO:202, and the light chain (LC) CDR-L1, CDR-L2, and CDR-L3 of SEQ ID NO:201. In exemplary embodiments, the CDRs are defined according to Kabat, Chothia, AbM, contact, or IMGT.

[0287] In various embodiments, the antigen binding protein comprises the heavy chain (HC) CDR-H1, CDR-H2, and CDR-H3 of SEQ ID NO:222, and the light chain (LC) CDR-L1, CDR-L2, and CDR-L3 of SEQ ID NO:221. In exemplary embodiments, the CDRs are defined according to Kabat, Chothia, AbM, contact, or IMGT.

[0288] In various embodiments, the antigen binding protein comprises the heavy chain (HC) CDR-H1, CDR-H2, and CDR-H3 of SEQ ID NO:242, and the light chain (LC) CDR-L1, CDR-L2, and CDR-L3 of SEQ ID NO:241. In exemplary embodiments, the CDRs are defined according to Kabat, Chothia, AbM, contact, or IMGT.

[0289] In various embodiments, the antigen binding protein comprises the heavy chain (HC) CDR-H1, CDR-H2, and CDR-H3 of SEQ ID NO:262, and the light chain (LC) CDR-L1, CDR-L2, and CDR-L3 of SEQ ID NO:261. In exemplary embodiments, the CDRs are defined according to Kabat, Chothia, AbM, contact, or IMGT.

[0290] In various embodiments, the antigen binding protein comprises the heavy chain (HC) CDR-H1, CDR-H2, and CDR-H3 of SEQ ID NO:282, and the light chain (LC) CDR-L1, CDR-L2, and CDR-L3 of SEQ ID NO:281. In exemplary embodiments, the CDRs are defined according to Kabat, Chothia, AbM, contact, or IMGT.

[0291] In various embodiments, the antigen binding protein comprises the heavy chain (HC) CDR-H1, CDR-H2, and CDR-H3 of SEQ ID NO:540, and the light chain (LC) CDR-L1, CDR-L2, and CDR-L3 of SEQ ID NO:539. In exemplary embodiments, the CDRs are defined according to Kabat, Chothia, AbM, contact, or IMGT.

[0292] In various embodiments, the anti-TREM-1 antigen-binding protein comprises:
[0293] a. a light chain variable domain comprising an amino acid sequence selected from the group consisting of:
   [0294] i. a sequence at least 80% identical to an amino acid sequence selected from SEQ ID NOS: 21, 41, 61, 81, 101, 121, 141, 161, 181, 201, 221, 241, 261, 281, and 539;
   [0295] ii. a sequence encoded by a polynucleotide sequence that is at least 80% identical to a nucleic acid sequence selected from SEQ ID NOS: 19, 39, 59, 79, 99, 119, 139, 159, 179, 199, 219, 239, 259, 279, and 537;
   [0296] iii. a sequence encoded by a polynucleotide that hybridizes under moderately stringent conditions to the complement of a polynucleotide consisting of a nucleic acid sequence selected from SEQ ID NOS: 19, 39, 59, 79, 99, 119, 139, 159, 179, 199, 219, 239, 259, 279, and 537; and
[0297] b. a heavy chain variable domain comprising an amino acid sequence selected from the group consisting of:
   [0298] i. a sequence that is at least 80% identical to an amino acid sequence selected from SEQ ID NOS: 22, 42, 62, 82, 102. 122, 142, 162, 182, 202, 222, 242, 262, 282, and 540;
   [0299] ii. a sequence encoded by a polynucleotide sequence that is at least 80% identical to an amino acid sequence selected from SEQ ID NOS: 20, 40, 60, 80, 100, 120, 140,160, 180, 200, 220, 240, 260, 280, and 538; and
   [0300] iii. a sequence encoded by a polynucleotide that hybridizes under moderately stringent conditions to the complement of a polynucleotide consisting of a nucleic sequence selected from SEQ ID NOS: 20, 40, 60, 80, 100, 120, 140, 160, 180, 200, 220, 240, 260, 280, and 538.

[0301] In various embodiments, the anti-TREM-1 antigen-binding protein comprises:
[0302] a. a light chain variable domain comprising an amino acid sequence selected from the group consisting of:
   [0303] i. a sequence at least 80% identical to an amino acid sequence selected from SEQ ID NOS: 21, 41, 61, 101, 141, 161, and 281;
   [0304] ii. a sequence encoded by a polynucleotide sequence that is at least 80% identical to a nucleic acid sequence selected from SEQ ID NOS: 19, 39, 59, 99, 139, 159, and 279;
   [0305] iii. a sequence encoded by a polynucleotide that hybridizes under moderately stringent conditions to the complement of a polynucleotide consisting of a nucleic acid sequence selected from SEQ ID NOS: 19, 39, 59, 99, 139, 159, and 279; and
[0306] b. a heavy chain variable domain comprising an amino acid sequence selected from the group consisting of:
   [0307] i. a sequence that is at least 80% identical to an amino acid sequence selected from SEQ ID NOS: 22, 42, 62, 102, 142, 162, and 282;
   [0308] ii. a sequence encoded by a polynucleotide sequence that is at least 80% identical to an amino acid sequence selected from SEQ ID NOS: 20, 40, 60, 100, 140, 160, and 280;
   [0309] iii. a sequence encoded by a polynucleotide that hybridizes under moderately stringent conditions to the complement of a polynucleotide consisting of a nucleic sequence selected from SEQ ID NOS: 20, 40, 60, 100, 140, 160, and 280.

[0310] In various embodiments, the anti-TREM-1 antigen-binding protein comprises:
[0311] a. a light chain variable domain comprising an amino acid sequence selected from the group consisting of:
   [0312] i. a sequence at least 80% identical to an amino acid sequence selected from SEQ ID NOS: 41 and 101;
   [0313] ii. a sequence encoded by a polynucleotide sequence that is at least 80% identical to a nucleic acid sequence selected from SEQ ID NOS: 39 and 99;
   [0314] iii. a sequence encoded by a polynucleotide that hybridizes under moderately stringent conditions to the complement of a polynucleotide consisting of a nucleic acid sequence selected from SEQ ID NOS: 39 and 99; and
[0315] b. a heavy chain variable domain comprising an amino acid sequence selected from the group consisting of:
   [0316] i. a sequence that is at least 80% identical to an amino acid sequence selected from SEQ ID NOS: 42 and 102;
   [0317] ii. a sequence encoded by a polynucleotide sequence that is at least 80% identical to an amino acid sequence selected from SEQ ID NOS: 40 and 100;
   [0318] iii. a sequence encoded by a polynucleotide that hybridizes under moderately stringent conditions to the complement of a polynucleotide consisting of a nucleic sequence selected from SEQ ID NOS: 40 and 100.

[0319] In various embodiments, the amino acid sequences can be 80%, 85%, 90%, 91%, 92%, 93%, 94%, 95%, 96%, 97%, 98% or 99% identical to SEQ ID NOs: 21, 41, 61, 81, 101, 121, 141, 161, 181, 201, 221, 241, 261, 281, and 539 and SEQ ID NO: 22, 42, 62, 82, 102. 122, 142, 162, 182, 202, 222, 242, 262, 282, and 540.

[0320] In various embodiments, the antigen binding protein comprises an amino acid sequence at least 90% identical to a heavy chain variable region amino acid sequence selected from SEQ ID NOS: 22, 42, 62, 82, 102. 122, 142, 162, 182, 202, 222, 242, 262, 282, and 540.

[0321] In various embodiments, the antigen-binding protein comprises an amino acid sequence at least 90% identical to a light chain variable region amino acid sequence selected from SEQ ID NOs: 21, 41, 61, 81, 101, 121, 141, 161, 181, 201, 221, 241, 261, 281, and 539.

[0322] In various embodiments, the antigen binding protein comprises a heavy chain amino acid sequence at least 90% identical to a sequence selected from SEQ ID NOS: 22, 42, 62, 102, 142, 162, and 282 and a light chain amino acid sequence at least 90% identical to a sequence selected from SEQ ID NOS: 21, 41, 61, 101, 141, 161, and 281.

[0323] In various embodiments, the antigen binding protein comprises a heavy chain amino acid sequence at least 90% identical to a sequence selected from SEQ ID NOS:4 and 102, and a light chain amino acid sequence at least 90% identical to a sequence selected from SEQ ID NOS: 41 and 101.

[0324] In various embodiments, the antigen binding protein comprises a heavy chain variable domain (VH) comprising three CDRs that in combination are at least 85% identical to the three heavy chain CDRs in SEQ ID NO:22; and a light chain variable domain (VL) comprising three CDRs that in combination are at least 85% identical to the three light chain CDRs in SEQ ID NO:21. In various embodiments, the antigen binding protein comprises a VH comprising three CDRs that in combination are at least 90% identical to the three heavy chain CDRs in SEQ ID NO:22; and a VL comprising three CDRs that in combination are at least 90% identical to the three light chain CDRs in SEQ ID NO:21. In various embodiments, the antigen binding protein comprises a VH comprising three CDRs that in combination are at least 95% identical to the three heavy chain CDRs in SEQ ID NO:22; and a VL comprising three CDRs that in combination are at least 95% identical to the three light chain CDRs in SEQ ID NO:21. The percent identity is determined by overall percent identity when combining three CDR sequences together and align them against the sequences disclosed herein. The antigen binding protein may further bind to its target (TREM-1) with a KD value of 100 nM or less, or a KD value of 50 nM or less.

[0325] In various embodiments, the antigen binding protein comprises a heavy chain variable domain (VH) comprising three CDRs that in combination are at least 85% identical to the three heavy chain CDRs in SEQ ID NO:42; and a light chain variable domain (VL) comprising three CDRs that in combination are at least 85% identical to the three light chain CDRs in SEQ ID NO:41. In various embodiments, the antigen binding protein comprises a VH comprising three CDRs that in combination are at least 90% identical to the three heavy chain CDRs in SEQ ID NO:42; and a VL comprising three CDRs that in combination are at least 90% identical to the three light chain CDRs in SEQ ID NO:41. In various embodiments, the antigen binding protein comprises a VH comprising three CDRs that in combination are at least 95% identical to the three heavy chain CDRs in SEQ ID NO:42; and a VL comprising three CDRs that in combination are at least 95% identical to the three light chain CDRs in SEQ ID NO:41. The antigen binding protein may further bind to its target (TREM-1) with a KD value of 100 nM or less, or a KD value of 50 nM or less.

[0326] In various embodiments, the antigen binding protein comprises a heavy chain variable domain (VH) comprising three CDRs that in combination are at least 85% identical to the three heavy chain CDRs in SEQ ID NO:62; and a light chain variable domain (VL) comprising three CDRs that in combination are at least 85% identical to the three light chain CDRs in SEQ ID NO:61. In various embodiments, the antigen binding protein comprises a VH comprising three CDRs that in combination are at least 90% identical to the three heavy chain CDRs in SEQ ID NO:62; and a VL comprising three CDRs that in combination are at least 90% identical to the three light chain CDRs in SEQ ID NO:61. In various embodiments, the antigen binding protein comprises a VH comprising three CDRs that in combination are at least 95% identical to the three heavy chain CDRs in SEQ ID NO:62; and a VL comprising three CDRs that in combination are at least 95% identical to the three light chain CDRs in SEQ ID NO:61. The antigen binding protein may further bind to its target (TREM-1) with a KD value of 100 nM or less, or a KD value of 50 nM or less.

[0327] In various embodiments, the antigen binding protein comprises a heavy chain variable domain (VH) comprising three CDRs that in combination are at least 85% identical to the three heavy chain CDRs in SEQ ID NO:82; and a light chain variable domain (VL) comprising three CDRs that in combination are at least 85% identical to the three light chain CDRs in SEQ ID NO:81. In various embodiments, the antigen binding protein comprises a VH comprising three CDRs that in combination are at least 90% identical to the three heavy chain CDRs in SEQ ID NO:82; and a VL comprising three CDRs that in combination are at least 90% identical to the three light chain CDRs in SEQ ID NO:81. In various embodiments, the antigen binding protein comprises a VH comprising three CDRs that in combination are at least 95% identical to the three heavy chain CDRs in SEQ ID NO:82; and a VL comprising three CDRs that in combination are at least 95% identical to the three light chain CDRs in SEQ ID NO:81. The antigen binding protein may further bind to its target (TREM-1) with a KD value of 100 nM or less, or a KD value of 50 nM or less.

[0328] In various embodiments, the antigen binding protein comprises a heavy chain variable domain (VH) comprising three CDRs that in combination are at least 85% identical to the three heavy chain CDRs in SEQ ID NO:102; and a light chain variable domain (VL) comprising three CDRs that in combination are at least 85% identical to the three light chain CDRs in SEQ ID NO:101. In various embodiments, the antigen binding protein comprises a VH comprising three CDRs that in combination are at least 90% identical to the three heavy chain CDRs in SEQ ID NO:102; and a VL comprising three CDRs that in combination are at least 90% identical to the three light chain CDRs in SEQ ID NO:101. In various embodiments, the antigen binding protein comprises a VH comprising three CDRs that in combination are at least 95% identical to the three heavy chain CDRs in SEQ ID NO:102; and a VL comprising three CDRs that in combination are at least 95% identical to the three light chain CDRs in SEQ ID NO:101. The antigen binding protein may further bind to its target (TREM-1) with a KD value of 100 nM or less, or a KD value of 50 nM or less.

[0329] In various embodiments, the antigen binding protein comprises a heavy chain variable domain (VH) comprising three CDRs that in combination are at least 85% identical to the three heavy chain CDRs in SEQ ID NO:122; and a light chain variable domain (VL) comprising three CDRs that in combination are at least 85% identical to the three light chain CDRs in SEQ ID NO:121. In various embodiments, the antigen binding protein comprises a VH comprising three CDRs that in combination are at least 90% identical to the three heavy chain CDRs in SEQ ID NO:122; and a VL comprising three CDRs that in combination are at least 90% identical to the three light chain CDRs in SEQ ID NO:121. In various embodiments, the antigen binding protein comprises a VH comprising three CDRs that in combination are at least 95% identical to the three heavy chain CDRs in SEQ ID NO:122; and a VL comprising three CDRs that in combination are at least 95% identical to the three light chain CDRs in SEQ ID NO:121. The antigen binding protein may further bind to its target (TREM-1) with a KD value of 100 nM or less, or a KD value of 50 nM or less.

[0330] In various embodiments, the antigen binding protein comprises a heavy chain variable domain (VH) comprising three CDRs that in combination are at least 85% identical to the three heavy chain CDRs in SEQ ID NO:122; and a light chain variable domain (VL) comprising three CDRs that in combination are at least 85% identical to the three light chain CDRs in SEQ ID NO:121. In various embodiments, the antigen binding protein comprises a VH comprising three CDRs that in combination are at least 90% identical to the three heavy chain CDRs in SEQ ID NO:122; and a VL comprising three CDRs that in combination are at least 90% identical to the three light chain CDRs in SEQ ID NO:121. In various embodiments, the antigen binding protein comprises a VH comprising three CDRs that in combination are at least 95% identical to the three heavy chain CDRs in SEQ ID NO:122; and a VL comprising three CDRs that in combination are at least 95% identical to the three light chain CDRs in SEQ ID NO:121. The antigen binding protein may further bind to its target (TREM-1) with a KD value of 100 nM or less, or a KD value of 50 nM or less.

[0331] In various embodiments, the antigen binding protein comprises a heavy chain variable domain (VH) comprising three CDRs that in combination are at least 85% identical to the three heavy chain CDRs in SEQ ID NO:142; and a light chain variable domain (VL) comprising three CDRs that in combination are at least 85% identical to the three light chain CDRs in SEQ ID NO:141. In various embodiments, the antigen binding protein comprises a VH comprising three CDRs that in combination are at least 90% identical to the three heavy chain CDRs in SEQ ID NO:142; and a VL comprising three CDRs that in combination are at least 90% identical to the three light chain CDRs in SEQ ID NO:141. In various embodiments, the antigen binding protein comprises a VH comprising three CDRs that in combination are at least 95% identical to the three heavy chain CDRs in SEQ ID NO:142; and a VL comprising three CDRs that in combination are at least 95% identical to the three light chain CDRs in SEQ ID NO:141. The antigen binding protein may further bind to its target (TREM-1) with a KD value of 100 nM or less, or a KD value of 50 nM or less.

[0332] In various embodiments, the antigen binding protein comprises a heavy chain variable domain (VH) comprising three CDRs that in combination are at least 85% identical to the three heavy chain CDRs in SEQ ID NO:162; and a light chain variable domain (VL) comprising three CDRs that in combination are at least 85% identical to the three light chain CDRs in SEQ ID NO:161. In various embodiments, the antigen binding protein comprises a VH comprising three CDRs that in combination are at least 90% identical to the three heavy chain CDRs in SEQ ID NO:162; and a VL comprising three CDRs that in combination are at least 90% identical to the three light chain CDRs in SEQ ID NO:161. In various embodiments, the antigen binding protein comprises a VH comprising three CDRs that in combination are at least 95% identical to the three heavy chain CDRs in SEQ ID NO:162; and a VL comprising three CDRs that in combination are at least 95% identical to the three light chain CDRs in SEQ ID NO:161. The antigen binding protein may further bind to its target (TREM-1) with a KD value of 100 nM or less, or a KD value of 50 nM or less.

[0333] In various embodiments, the antigen binding protein comprises a heavy chain variable domain (VH) comprising three CDRs that in combination are at least 85% identical to the three heavy chain CDRs in SEQ ID NO:182; and a light chain variable domain (VL) comprising three CDRs that in combination are at least 85% identical to the three light chain CDRs in SEQ ID NO:181. In various embodiments, the antigen binding protein comprises a VH comprising three CDRs that in combination are at least 90% identical to the three heavy chain CDRs in SEQ ID NO:182; and a VL comprising three CDRs that in combination are at least 90% identical to the three light chain CDRs in SEQ ID NO:181. In various embodiments, the antigen binding protein comprises a VH comprising three CDRs that in combination are at least 95% identical to the three heavy chain CDRs in SEQ ID NO:182; and a VL comprising three CDRs that in combination are at least 95% identical to the three light chain CDRs in SEQ ID NO:181. The antigen binding protein may further bind to its target (TREM-1) with a KD value of 100 nM or less, or a KD value of 50 nM or less.

[0334] In various embodiments, the antigen binding protein comprises a heavy chain variable domain (VH) comprising three CDRs that in combination are at least 85% identical to the three heavy chain CDRs in SEQ ID NO:202; and a light chain variable domain (VL) comprising three CDRs that in combination are at least 85% identical to the three light chain CDRs in SEQ ID NO:201. In various embodiments, the antigen binding protein comprises a VH comprising three CDRs that in combination are at least 90% identical to the three heavy chain CDRs in SEQ ID NO:202; and a VL comprising three CDRs that in combination are at least 90% identical to the three light chain CDRs in SEQ ID NO:201. In various embodiments, the antigen binding protein comprises a VH comprising three CDRs that in combination are at least 95% identical to the three heavy chain CDRs in SEQ ID NO:202; and a VL comprising three CDRs that in combination are at least 95% identical to the three light chain CDRs in SEQ ID NO:201. The antigen binding protein may further bind to its target (TREM-1) with a KD value of 100 nM or less, or a KD value of 50 nM or less.

[0335] In various embodiments, the antigen binding protein comprises a heavy chain variable domain (VH) comprising three CDRs that in combination are at least 85% identical to the three heavy chain CDRs in SEQ ID NO:222; and a light chain variable domain (VL) comprising three CDRs that in combination are at least 85% identical to the three light chain CDRs in SEQ ID NO:221. In various embodiments, the antigen binding protein comprises a VH comprising three CDRs that in combination are at least 90% identical to the three heavy chain CDRs in SEQ ID NO:222; and a VL comprising three CDRs that in combination are at least 90% identical to the three light chain CDRs in SEQ ID NO:221. In various embodiments, the antigen binding protein comprises a VH comprising three CDRs that in combination are at least 95% identical to the three heavy chain CDRs in SEQ ID NO:222; and a VL comprising three CDRs that in combination are at least 95% identical to the three light chain CDRs in SEQ ID NO:221. The antigen binding protein may further bind to its target (TREM-1) with a KD value of 100 nM or less, or a KD value of 50 nM or less.

[0336] In various embodiments, the antigen binding protein comprises a heavy chain variable domain (VH) comprising three CDRs that in combination are at least 85% identical to the three heavy chain CDRs in SEQ ID NO:242; and a light chain variable domain (VL) comprising three CDRs that in combination are at least 85% identical to the three light chain CDRs in SEQ ID NO:241. In various embodiments, the antigen binding protein comprises a VH comprising three CDRs that in combination are at least 90% identical to the three heavy chain CDRs in SEQ ID NO:242; and a VL comprising three CDRs that in combination are at least 90% identical to the three light chain CDRs in SEQ ID NO:241. In various embodiments, the antigen binding protein comprises a VH comprising three CDRs that in combination are at least 95% identical to the three heavy chain CDRs in SEQ ID NO:242; and a VL comprising three CDRs that in combination are at least 95% identical to the three light chain CDRs in SEQ ID NO:241. The antigen binding protein may further bind to its target (TREM-1) with a KD value of 100 nM or less, or a KD value of 50 nM or less.

[0337] In various embodiments, the antigen binding protein comprises a heavy chain variable domain (VH) comprising three CDRs that in combination are at least 85% identical to the three heavy chain CDRs in SEQ ID NO:262; and a light chain variable domain (VL) comprising three CDRs that in combination are at least 85% identical to the three light chain CDRs in SEQ ID NO:261. In various embodiments, the antigen binding protein comprises a VH comprising three CDRs that in combination are at least 90% identical to the three heavy chain CDRs in SEQ ID NO:262; and a VL comprising three CDRs that in combination are at least 90% identical to the three light chain CDRs in SEQ ID NO:261. In various embodiments, the antigen binding protein comprises a VH comprising three CDRs that in combination are at least 95% identical to the three heavy chain CDRs in SEQ ID NO:262; and a VL comprising three CDRs that in combination are at least 95% identical to the three light chain CDRs in SEQ ID NO:261. The antigen binding protein may further bind to its target (TREM-1) with a KD value of 100 nM or less, or a KD value of 50 nM or less.

[0338] In various embodiments, the antigen binding protein comprises a heavy chain variable domain (VH) comprising three CDRs that in combination are at least 85% identical to the three heavy chain CDRs in SEQ ID NO:282; and a light chain variable domain (VL) comprising three CDRs that in combination are at least 85% identical to the three light chain CDRs in SEQ ID NO:281. In various embodiments, the antigen binding protein comprises a VH comprising three CDRs that in combination are at least 90% identical to the three heavy chain CDRs in SEQ ID NO:282; and a VL comprising three CDRs that in combination are at least 90% identical to the three light chain CDRs in SEQ ID NO:281. In various embodiments, the antigen binding protein comprises a VH comprising three CDRs that in combination are at least 95% identical to the three heavy chain CDRs in SEQ ID NO:282; and a VL comprising three CDRs that in combination are at least 95% identical to the three light chain CDRs in SEQ ID NO:281. The antigen binding protein may further bind to its target (TREM-1) with a KD value of 100 nM or less, or a KD value of 50 nM or less.

[0339] In various embodiments, the antigen binding protein comprises a heavy chain variable domain (VH) comprising three CDRs that in combination are at least 85% identical to the three heavy chain CDRs in SEQ ID NO:540; and a light chain variable domain (VL) comprising three CDRs that in combination are at least 85% identical to the three light chain CDRs in SEQ ID NO:539. In various embodiments, the antigen binding protein comprises a VH comprising three CDRs that in combination are at least 90% identical to the three heavy chain CDRs in SEQ ID NO:540; and a VL comprising three CDRs that in combination are at least 90% identical to the three light chain CDRs in SEQ ID NO:539. In various embodiments, the antigen binding protein comprises a VH comprising three CDRs that in combination are at least 95% identical to the three heavy chain CDRs in SEQ ID NO:540; and a VL comprising three CDRs that in combination are at least 95% identical to the three light chain CDRs in SEQ ID NO:539. The antigen binding protein may further bind to its target (TREM-1) with a KD value of 100 nM or less, or a KD value of 50 nM or less.

[0340] In various embodiments, the disclosure provides a method for treating cardiovascular disease (e.g., atherosclerosis or myocardial infarction) comprising administering an antigen binding protein, wherein the antigen binding protein: binds to human TrigGering Receptor Expressed on Myeloid cells 1 (TREM-1) and comprises a set of CDR sequences selected from:
[0341] i) SEQ ID NO: 10 (LCDR1), SEQ ID NO: 11 (LCDR2), SEQ ID NO: 12 (LCDR3), SEQ ID NO: 16 (HCDR1), SEQ ID NO: 17 (HCDR2) and SEQ ID NO: 18 (HCDR3);
[0342] ii) SEQ ID NO: 30 (LCDR1), SEQ ID NO: 31 (LCDR2), SEQ ID NO: 32 (LCDR3), SEQ ID NO: 36 (HCDR1), SEQ ID NO: 37 (HCDR2) and SEQ ID NO: 38 (HCDR3);
[0343] iii) SEQ ID NO: 50 (LCDR1), SEQ ID NO: 51 (LCDR2), SEQ ID NO: 52 (LCDR3), SEQ ID NO: 56 (HCDR1), SEQ ID NO: 57 (HCDR2) and SEQ ID NO: 58 (HCDR3);
[0344] iv) SEQ ID NO: 70 (LCDR1), SEQ ID NO: 71 (LCDR2), SEQ ID NO: 72 (LCDR3), SEQ ID NO: 76 (HCDR1), SEQ ID NO: 77 (HCDR2) and SEQ ID NO: 78 (HCDR3);
[0345] v) SEQ ID NO: 90 (LCDR1), SEQ ID NO: 91 (LCDR2), SEQ ID NO: 92 (LCDR3), SEQ ID NO: 96 (HCDR1), SEQ ID NO: 97 (HCDR2) and SEQ ID NO: 98 (HCDR3);
[0346] vi) SEQ ID NO: 110 (LCDR1), SEQ ID NO: 111 (LCDR2), SEQ ID NO: 112 (LCDR3), SEQ ID NO: 116 (HCDR1), SEQ ID NO: 117 (HCDR2) and SEQ ID NO: 118 (HCDR3);
[0347] vii) SEQ ID NO: 130 (LCDR1), SEQ ID NO: 131 (LCDR2), SEQ ID NO: 132 (LCDR3), SEQ ID NO: 136 (HCDR1), SEQ ID NO: 137 (HCDR2) and SEQ ID NO: 138 (HCDR3);
[0348] viii) SEQ ID NO: 150 (LCDR1), SEQ ID NO: 151 (LCDR2), SEQ ID NO: 152 (LCDR3), SEQ ID NO: 156 (HCDR1), SEQ ID NO: 157 (HCDR2) and SEQ ID NO: 158 (HCDR3);
[0349] ix) SEQ ID NO: 170 (LCDR1), SEQ ID NO: 171 (LCDR2), SEQ ID NO: 172 (LCDR3), SEQ ID NO: 176 (HCDR1), SEQ ID NO: 177 (HCDR2) and SEQ ID NO: 178 (HCDR3);
[0350] x) SEQ ID NO: 190 (LCDR1), SEQ ID NO: 191 (LCDR2), SEQ ID NO: 192 (LCDR3), SEQ ID NO: 196 (HCDR1), SEQ ID NO: 197 (HCDR2) and SEQ ID NO: 198 (HCDR3);
[0351] xi) SEQ ID NO: 210 (LCDR1), SEQ ID NO: 211 (LCDR2), SEQ ID NO: 212 (LCDR3), SEQ ID NO: 216 (HCDR1), SEQ ID NO: 217 (HCDR2) and SEQ ID NO: 218 (HCDR3);
[0352] xii) SEQ ID NO: 230 (LCDR1), SEQ ID NO: 231 (LCDR2), SEQ ID NO: 232 (LCDR3), SEQ ID NO: 236 (HCDR1), SEQ ID NO: 237 (HCDR2) and SEQ ID NO: 238 (HCDR3);
[0353] xiii) SEQ ID NO: 250 (LCDR1), SEQ ID NO: 251 (LCDR2), SEQ ID NO: 252 (LCDR3), SEQ ID NO: 256 (HCDR1), SEQ ID NO: 257 (HCDR2) and SEQ ID NO: 258 (HCDR3);
[0354] ix) SEQ ID NO: 270 (LCDR1), SEQ ID NO: 271 (LCDR2), SEQ ID NO: 272 (LCDR3), SEQ ID NO: 276 (HCDR1), SEQ ID NO: 277 (HCDR2) and SEQ ID NO: 278 (HCDR3); and
[0355] xv) SEQ ID NO: 544 (LCDR1), SEQ ID NO: 545 (LCDR2), SEQ ID NO: 546 (LCDR3), SEQ ID NO: 547 (HCDR1), SEQ ID NO: 548 (HCDR2) and SEQ ID NO: 549 (HCDR3).

[0356] In various embodiments, the anti-TREM-1 antigen-binding protein comprises a set of CDR sequences selected from:
[0357] i) SEQ ID NO: 10 (LCDR1), SEQ ID NO: 11 (LCDR2), SEQ ID NO: 12 (LCDR3), SEQ ID NO: 16 (HCDR1), SEQ ID NO: 17 (HCDR2) and SEQ ID NO: 18 (HCDR3);
[0358] ii) SEQ ID NO: 30 (LCDR1), SEQ ID NO: 31 (LCDR2), SEQ ID NO: 32 (LCDR3), SEQ ID NO: 36 (HCDR1), SEQ ID NO: 37 (HCDR2) and SEQ ID NO: 38 (HCDR3);
[0359] iii) SEQ ID NO: 50 (LCDR1), SEQ ID NO: 51 (LCDR2), SEQ ID NO: 52 (LCDR3), SEQ ID NO: 56 (HCDR1), SEQ ID NO: 57 (HCDR2) and SEQ ID NO: 58 (HCDR3);
[0360] iv) SEQ ID NO: 90 (LCDR1), SEQ ID NO: 91 (LCDR2), SEQ ID NO: 92 (LCDR3), SEQ ID NO: 96 (HCDR1), SEQ ID NO: 97 (HCDR2) and SEQ ID NO: 98 (HCDR3);
[0361] v) SEQ ID NO: 130 (LCDR1), SEQ ID NO: 131 (LCDR2), SEQ ID NO: 132 (LCDR3), SEQ ID NO: 136 (HCDR1), SEQ ID NO: 137 (HCDR2) and SEQ ID NO: 138 (HCDR3);
[0362] vi) SEQ ID NO: 150 (LCDR1), SEQ ID NO: 151 (LCDR2), SEQ ID NO: 152 (LCDR3), SEQ ID NO: 156 (HCDR1), SEQ ID NO: 157 (HCDR2) and SEQ ID NO: 158 (HCDR3); or
[0363] vii) SEQ ID NO: 270 (LCDR1), SEQ ID NO: 271 (LCDR2), SEQ ID NO: 272 (LCDR3), SEQ ID NO: 276 (HCDR1), SEQ ID NO: 277 (HCDR2) and SEQ ID NO: 278 (HCDR3).

[0364] In various embodiments, the anti-TREM-1 antigen binding protein comprises a set of CDR sequences selected from SEQ ID NO: 30 (LCDR1), SEQ ID NO: 31 (LCDR2), SEQ ID NO: 32 (LCDR3), SEQ ID NO: 36 (HCDR1), SEQ ID NO: 37 (HCDR2) and SEQ ID NO: 38 (HCDR3); or SEQ ID NO: 90 (LCDR1), SEQ ID NO: 91 (LCDR2), SEQ ID NO: 92 (LCDR3), SEQ ID NO: 96 (HCDR1), SEQ ID NO: 97 (HCDR2) and SEQ ID NO: 98 (HCDR3).

[0365] Binding affinities of the TREM-1 antigen binding proteins can be assessed by KD. KD is the equilibrium dissociation constant, a ratio of k_{off}/kₒₙ, between the antigen binding protein and its target or antigen. KD and KA are inversely related. The KD value relates to the concentration of the antibody (the amount of antibody needed for a particular experiment) and so the lower the KD value (lower concentration needed) the higher the affinity of the antibody. In exemplary aspects, the KD value of the TREM-1 antigen binding protein to its target is about 10⁻¹ M or less, about 10⁻² M or less, about 10⁻³ M or less, about 10⁻⁴ M or less, about 10⁻⁵ M or less, about 10⁻⁶ M or less, about 10⁻⁷ M or less, about 10⁻⁸ M or less, about 10⁻⁹ M or less, about 10⁻¹⁰ M or less, about 10⁻¹¹ M or less, about 10⁻¹² M or less, about 10⁻¹³ M or less, about 10⁻¹⁴ M or less, from about 10⁻⁵ M to about 10⁻¹⁵ M, from about 10⁻⁶ M to about 10⁻¹⁵ M, from about 10⁻⁷ M to about 10⁻¹⁵ M, from about 10⁻⁸ M to about 10⁻¹⁵ M, from about 10⁻⁹ M to about 10⁻¹⁵ M, from about 10⁻¹⁰ M to about 10⁻¹⁵ M, from about 10⁻⁵ M to about 10⁻¹⁴ M, from about 10⁻⁶ M to about 10⁻¹⁴ M, from about 10⁻⁷ M to about 10⁻¹⁴ M, from about 10⁻⁸ M to about 10⁻¹⁴ M, from about 10⁻⁹ M to about 10⁻¹⁴ M, from about 10⁻¹⁰ M to about 10⁻¹⁴ M, from about 10⁻⁵ M to about 10⁻¹³ M, from about 10⁻⁶ M to about 10⁻¹³ M, from about 10⁻⁷ M to about 10⁻¹³ M, from about 10⁻⁸ M to about 10⁻¹³ M, from about 10⁻⁹ M to about 10⁻¹³ M, or from about 10⁻¹⁰ M to about 10⁻¹³ M.

[0366] In exemplary aspects, the KD value of the TREM-1 antigen binding protein to its target is micromolar, nanomolar, picomolar, or femtomolar. In exemplary aspects, the KD is within a range of about 10⁻⁴ to 10⁻⁶ M, or 10⁻⁷ to 10⁻⁹ M, or 10⁻¹⁰ to 10⁻¹² M, or 10⁻¹³ to 10⁻¹⁵ M. In exemplary aspects, the TREM-1 antigen binding protein binds to its target with a KD value of: about 1 uM or less, about 900 nM or less, about 800 nM or less, about 700 nM or less, about 600 nM or less, about 500 nM or less, about 400 nM or less, about 300 nM or less, about 200 nM or less, about 100 nM or less, about 90 nM or less, about 80 nM or less, about 70 nM or less, about 60 nM or less, about 50 nM or less, about 40 nM or less, about 30 nM or less, about 20 nM or less, about 10 nM or less, about 5 nM or less, about 2 nM or less, about 1 nM or less, about 900 pM or less, about 800 pM or less, about 700 pM or less, about 600 pM or less, about 500 pM or less, about 400 pM or less, about 300 pM or less, about 250 pM or less, about 200 pM or less, about 150 pM or less, about 100 pM or less, about 50 pM or less, about 40 pM or less, about 30 pM or less, about 25 pM or less, about 20 pM or less, about 15 pM or less, about 10 pM or less, about 5 pM or less, or about 1 pM or less.

[0367] KD values can be determined using methods well established in the art. One exemplary method for measuring KD is surface plasmon resonance (SPR), a method well-known in the art (e.g., Nguyen et al. Sensors (Basel). 2015 May 5; 15(5):10481-510). KD value may be measured by SPR using a biosensor system such as a BIACORE® system. BIAcore kinetic analysis comprises analyzing the binding and dissociation of an antigen from chips with immobilized molecules (e.g. molecules comprising epitope binding domains), on their surface. Another well-known method in the art for determining the KD of a protein is by using Bio-Layer Interferometry (e.g., Shah et al. J Vis Exp. 2014; (84): 51383). KD value may be measured by Bio-Layer Interferometry using OCTET® technology (Octet QKe system, ForteBio). Alternatively or in addition, a KinExA® (Kinetic Exclusion Assay) assay, available from Sapidyne Instruments (Boise, Id.) can also be used. Any method known in the art for assessing the binding affinity between two binding partners is encompassed herein.

[0368] In some aspects, the KD value is measured by surface plasmon resonance (SPR). Antigen (TREM-1) may be immobilized, e.g., on a solid surface. The antigen may be immobilized to a chip, for example by covalent coupling (such as amine coupling). The chip may be a CM5 sensor chip. As the analyte binds to the ligand the accumulation of protein on the sensor surface causes an increase in refractive index. This refractive index change is measured in real time (sampling in a kinetic analysis experiment is taken every 0.1 s), and the result plotted as response units (RU) versus time (termed a sensorgram). A response (background response) will also be generated if there is a difference in the refractive indices of the running and sample buffers. This background response must be subtracted from the sensorgram to obtain the actual binding response. The background response is recorded by injecting the analyte through a control or reference flow cell, which has no ligand or an irrelevant ligand immobilized to the sensor surface. The real-time measurement of association and dissociation of a binding interaction allows for the calculation of association and dissociation rate constants and the corresponding affinity constants. One RU represents the binding of 1 pg of protein per square mm. More than 50 pg per square mm of analyte binding is generally needed in practice to generate good reproducible responses.

[0369] Dissociation of the antigen binding protein from the antigen may be monitored for about 3600 seconds. The SPR analysis may be conducted, and the data collected at between about 15° C. and about 37° C. The SPR analysis may be conducted, and the data collected at between about 25° C. and 37° C. The SPR analysis may be conducted, and the data collected at about 37° C. The SPR analysis may be conducted, and the data collected at 37° C. The KD value may be measured by SPR using a BIAcore T200 instrument. The SPR rates and affinities may be determined by fitting resulting sensorgram data to a 1:1 model in BIAcore T200 Evaluation software version 1.0. The collection rate may be about 1 Hz.

[0370] Another method for determining the KD of an antibody is by using Bio-Layer Interferometry (BLI), typically using OCTET® technology (Octet QKe system, ForteBio). In some embodiments, biosensor analysis is used. Typically, one interactant is immobilized on the surface of the biosensor (“ligand,” such as an antigen binding protein) and the other remains in solution (“analyte”, such as an antigen). The assay begins with an initial baseline or equilibration step using assay buffer. Next, a ligand (such as an antigen binding protein) is immobilized on the surface of the biosensor (loading), either by direct immobilization or capture-based method. After ligand immobilization, biosensors are dipped into buffer solution for a baseline step to assess assay drift and determine loading level of ligand. After the baseline step, biosensors are dipped into a solution containing the ligand's binding partner, the analyte (association). In this step, the binding interaction of the analyte to the immobilized ligand is measured. Following analyte association, the biosensor is dipped into buffer solution without analyte, and the bound analyte is allowed to come off the ligand (dissociation). The series of assay steps is then repeated on new or regenerated biosensors for each analyte being tested. Each binding response is measured and reported in real time on a sensorgram trace. The instrument may be Octet QKe system, Octet RED96 system, Octet QK384 system, or RED384 system.

### Nucleic Acid Molecules

[0371] The disclosure also provides isolated nucleic acids encoding the antigen binding proteins described herein, which includes, for instance, the antigen binding protein light chain, light chain variable region, light chain constant region, antigen binding protein heavy chain, heavy chain variable region, heavy chain constant region, linkers, fusion proteins, and any and all components and combinations thereof. Nucleic acids of the invention include nucleic acids having at least 80%, more preferably at least about 90%, more preferably at least about 95%, and most preferably at least about 98% homology to nucleic acids of the invention. The terms “percent similarity”, “percent identity” and “percent homology” when referring to a particular sequence are used as set forth in the University of Wisconsin GCG® software program. Nucleic acids of the disclosure also include complementary nucleic acids. In some instances, the sequences will be fully complementary (no mismatches) when aligned. In other instances, there may be up to about a 20% mismatch in the sequences. In some embodiments of the invention are provided nucleic acids encoding both a heavy chain and a light chain of an antibody of the disclosure.

[0372] Nucleic acids of the disclosure can be cloned into a vector, such as a plasmid, cosmid, bacmid, phage, artificial chromosome (BAC, YAC) or virus, into which another genetic sequence or element (either DNA or RNA) may be inserted so as to bring about the replication of the attached sequence or element. In some embodiments, the expression vector contains a constitutively active promoter segment (such as but not limited to CMV, SV40, Elongation Factor or LTR sequences) or an inducible promoter sequence such as the steroid inducible pIND vector (Invitrogen), where the expression of the nucleic acid can be regulated. Expression vectors of the invention may further comprise regulatory sequences, for example, an internal ribosomal entry site. The expression vector can be introduced into a cell by transfection, for example.

[0373] Also provided is an expression vector comprising the following operably linked elements; a transcription promoter; a first nucleic acid molecule encoding an the heavy chain of an antigen binding protein, antibody or antigen-binding fragment of the disclosure; a second nucleic acid molecule encoding the light chain of an antigen binding protein, antibody or antigen-binding fragment of the disclosure; and a transcription terminator. In another embodiment, the present disclosure provides an expression vector comprising the following operably linked elements; a first transcription promoter; a first nucleic acid molecule encoding the heavy chain of an antigen binding protein, antibody or antigen-binding fragment of the disclosure; a first transcription terminator; a second transcription promoter optionally, a second nucleic acid molecule encoding the light chain of an antigen binding protein, antibody or antigen-binding fragment of the disclosure; and a second transcription terminator.

[0374] A secretory signal peptide sequence can also, optionally, be encoded by the expression vector, operably linked to the coding sequence of interest, so that the expressed polypeptide can be secreted by the recombinant host cell, for more facile isolation of the polypeptide of interest from the cell, if desired. For instance, in some embodiments, signal peptide sequences may be appended/fused to the amino terminus of any of the antigen binding protein, antibody or antigen binding fragment thereof polypeptide sequences described herein

[0375] Recombinant host cells comprising such vectors and expressing the antigen binding protein heavy and light chains are also provided. The recombinant host cell may be a prokaryotic cell, for example an E. coli cell, or a eukaryotic cell, for example a mammalian cell or a yeast cell. Yeast cells include Saccharomyces cerevisiae, Schizosaccharomvces pombe, and Pichia pastoris cells. Mammalian cells include VERO, HeLa, Chinese hamster Ovary (CHO), W138, baby hamster kidney (BHK), COS-7, MDCK, human embryonic kidney line 293, normal dog kidney cell lines, normal cat kidney cell lines, monkey kidney cells, African green monkey kidney cells, COS cells, and non-tumorigenic mouse myoblast G8 cells, fibroblast cell lines, myeloma cell lines, mouse NIH/3T3 cells, LMTK31 cells, mouse sertoli cells, human cervical carcinoma cells, buffalo rat liver cells, human lung cells, human liver cells, mouse mammary tumor cells, TRI cells, MRC 5 cells, and FS4 cells. Recombinant protein-producing cells of the disclosure also include any insect expression cell line known, such as for example, Spodoptera frugiperda cells. In one embodiment, the cells are mammalian cells. In a certain embodiment, the mammalian cells are CHO cells.

[0376] In a certain embodiment, the mammalian cells are HEK 293 cells.

[0377] Protein purification methods are known in the art and utilized herein for recovery of recombinant proteins from cell culture media. For example, methods of protein and antibody purification are known in the art and can be employed with production of the antibodies of the present disclosure. In some embodiments, methods for protein and antibody purification include filtration, affinity column chromatography, cation exchange chromatography, anion exchange chromatography, and concentration. The filtration step may comprise ultrafiltration, and optionally ultrafiltration and diafiltration. Filtration is preferably performed at least about 5-50 times, more preferably 10 to 30 times, and most preferably 14 to 27 times. Affinity column chromatography, may be performed using, for example, PROSEP® Affinity Chromatography (Millipore, Billerica, Mass.). In various embodiments, the affinity chromatography step comprises PROSEP®-vA column chromatography. Eluate may be washed in a solvent detergent. Cation exchange chromatography may include, for example, SP-Sepharose Cation Exchange Chromatography. Anion exchange chromatography may include, for example but not limited to, Q-Sepharose Fast Flow Anion Exchange. The anion exchange step is preferably non-binding, thereby allowing removal of contaminants including DNA and BSA. The antibody product is preferably nanofiltered, for example, using a Pall DV 20 Nanofilter. The antibody product may be concentrated, for example, using ultrafiltration and diafiltration. The method may further comprise a step of size exclusion chromatography to remove aggregates.

[0378] In some embodiments, different nucleic acid molecules encode a heavy chain variable region and a light chain variable region of a target specific antibody. In other embodiments, the same nucleic acid molecule encodes a heavy chain and a light chain variable regions of a target specific antibody. In one embodiment, the nucleic acid encodes a target specific antibody of the present disclosure, as well as any of the polypeptides encoded by the nucleic acids described herein.

[0379] In some embodiments, the nucleic acid molecule encodes a VH amino acid sequence that is at least 70%, 75%, 80%, 85%, 90%, 95%, 96%, 97%, 98% or 99% identical to a VH amino acid sequence set out in SEQ ID NOs: 22, 42, 62, 82, 102. 122, 142, 162, 182, 202, 222, 242, 262, 282, and 540. Nucleic acid molecules of the disclosure further include nucleic acids that hybridize under highly stringent conditions, such as those described herein, to a nucleic acid sequence encoding the heavy chain variable region amino acid sequence of SEQ ID NOs: 22, 42, 62, 82, 102. 122, 142, 162, 182, 202, 222, 242, 262, 282, and 540 or that has the heavy chain variable region nucleic acid sequence of any one of SEQ ID NOs: 20, 40, 60, 80, 100, 120, 140, 160, 180, 200, 220, 240, 260, 280, and 538.

[0380] In some embodiments, the nucleic acid molecule encodes a VL amino acid sequence that is at least 70%, 75%, 80%, 85%, 90%, 95%, 96%, 97%, 98% or 99% identical to a VL amino acid sequence set out in SEQ ID NOs: 21, 41, 61, 81, 101, 121, 141, 161, 181, 201, 221, 241, 261, 281, and 539. Nucleic acid molecules of the disclosure further include nucleic acids that hybridize under highly stringent conditions, such as those described herein, to a nucleic acid sequence encoding the light chain variable region amino acid sequence of SEQ ID NOs: 21, 41, 61, 81, 101, 121,141, 161, 181, 201, 221, 241, 261, 281, and 539, or that has the light chain variable region nucleic acid sequence of any one of SEQ ID NOs: 19, 39, 59, 79, 99, 119, 139, 159, 179, 199, 219, 239, 259, 279, and 537.

[0381] In one aspect, a nucleic acid molecule contemplated herein comprises a nucleotide sequence that encodes the VL amino acid sequence of anti-TREM-1 antigen binding proteins set out in herein or a portion thereof. In a related aspect, the VL amino acid sequence is a consensus sequence. In some embodiments, the nucleic acid encodes the amino acid sequence of the light chain CDRs of said antibody. In some embodiments, said portion is a contiguous portion comprising LCDR1-CDR3. In a related aspect, the LCDR1-3 amino acid sequences are consensus sequences. In one embodiment, said portion comprises at least one, two or three of a light chain CDR1, CDR2, or CDR3 region, optionally with a different human or human consensus framework, and optionally with 1, or up to 2, or up to 3 mutations in the collective 3 CDRs.

[0382] In one aspect, a nucleic acid molecule of the present disclosure comprises a nucleotide sequence that encodes the VH amino acid sequence of anti-TREM-1 antigen binding proteins set out herein, or a portion thereof. In a related aspect, the VH amino acid sequence is a consensus sequence. In some embodiments, the nucleic acid encodes the amino acid sequence of the heavy chain CDRs of said antibody. In some embodiments, said portion is a contiguous portion comprising HCDR1-CDR3. In a related aspect, the HCDR1-3 amino acid sequences are consensus sequences. In one embodiment, said portion comprises at least one, two or three of a heavy chain CDR1, CDR2, or CDR3 region, optionally with a different human or human consensus framework, and optionally with 1, or up to 2, or up to 3 mutations in the collective 3 CDRs.

[0383] In exemplary embodiments, an antibody of the disclosure comprises a human kappa (κ) or a human lambda (λ) light chain or an amino acid sequence derived therefrom, or a human heavy chain or a sequence derived therefrom, or both heavy and light chains together in a single chain, dimeric, tetrameric or other form.

### Derivatives

[0384] Suitable detectable molecules may be directly or indirectly attached to the antigen binding proteins of the present disclosure. Suitable detectable molecules include radionuclides, enzymes, substrates, cofactors, inhibitors, fluorescent markers, chemiluminescent markers, magnetic particles and the like. For indirect attachment of a detectable or cytotoxic molecule, the detectable or cytotoxic molecule can be conjugated with a member of a complementary/anti-complementary pair, where the other member is bound to the binding polypeptide or antibody portion. For these purposes, biotin/streptavidin is an exemplary complementary/anti-complementary pair.

[0385] The antigen binding proteins of the disclosure also include derivatives that are modified, e.g., by the covalent attachment of any type of molecule to the antibody such that covalent attachment does not prevent the antibody from binding to its epitope. Examples of suitable derivatives include but are not limited to derivatives that are fucosylated, glycosylated, acetylated, PEGylated, phosphorylated, or amidated. The, antigen binding proteins of the disclosure may themselves by derivatized by known protecting/blocking groups, proteolytic cleavage, linkage to a cellular ligand or other proteins, and the like. In some embodiments of the disclosure, at least one heavy chain of the antigen binding protein is PEGylated. In some embodiments, the PEGylation is N-linked or is linked through the sidechain of an amino acid (e.g., lysine).

[0386] Glycosylation can contribute to the effector function of antibodies, particularly IgG1 antibodies. Thus, in some embodiments, the antigen binding proteinsor of the disclosure may comprise one or more amino acid substitutions that affect the level or type of glycosylation of the binding proteins. Glycosylation of polypeptides is typically either N-linked or O-linked. N-linked refers to the attachment of the carbohydrate moiety to the side chain of an asparagine residue. The tri-peptide sequences asparagine-X-serine and asparagine-X-threonine, where X is any amino acid except proline, are the recognition sequences for enzymatic attachment of the carbohydrate moiety to the asparagine side chain. Thus, the presence of either of these tri-peptide sequences in a polypeptide creates a potential glycosylation site. O-linked glycosylation refers to the attachment of one of the sugars N-acetylgalactosamine, galactose, or xylose, to a hydroxyamino acid, most commonly serine or threonine, although 5-hydroxyproline or 5-hydroxylysine may also be used.

[0387] In certain embodiments, glycosylation of the antigen binding proteins described herein is increased by adding one or more glycosylation sites, e.g., to the Fc region of the binding protein. Addition of glycosylation sites to the antigen binding protein can be conveniently accomplished by altering the amino acid sequence such that it contains one or more of the above-described tri-peptide sequences (for N-linked glycosylation sites). The alteration may also be made by the addition of, or substitution by, one or more serine or threonine residues to the starting sequence (for O-linked glycosylation sites). For ease, the antigen binding protein amino acid sequence may be altered through changes at the DNA level, particularly by mutating the DNA encoding the target polypeptide at preselected bases such that codons are generated that will translate into the desired amino acids.

[0388] The disclosure also encompasses production of antigen binding proteins with altered carbohydrate structure resulting in altered effector activity, including antigen binding proteins with absent or reduced fucosylation that exhibit improved ADCC activity. Various methods are known in the art to reduce or eliminate fucosylation. For example, ADCC effector activity is mediated by binding of the antibody molecule to the FcγRIII receptor, which has been shown to be dependent on the carbohydrate structure of the N-linked glycosylation at the N297 residue of the CH2 domain. Non-fucosylated antibodies bind this receptor with increased affinity and trigger FcγRIII-mediated effector functions more efficiently than native, fucosylated antibodies. For example, recombinant production of non-fucosylated antibody in CHO cells in which the alpha-1,6-fucosyl transferase enzyme has been knocked out results in antibody with 100-fold increased ADCC activity (see Yamane-Ohnuki et al., Biotechnol Bioeng. 87(5):614-22, 2004). Similar effects can be accomplished through decreasing the activity of alpha-1,6-fucosyl transferase enzyme or other enzymes in the fucosylation pathway, e.g., through siRNA or antisense RNA treatment, engineering cell lines to knockout the enzyme(s), or culturing with selective glycosylation inhibitors (see Rothman et al., Mol Immunol. 26(12):1113-23, 1989). Some host cell strains, e.g. Lec13 or rat hybridoma YB2/0 cell line naturally produce antibodies with lower fucosylation levels (see Shields et al., J Biol Chem. 277(30):26733-40, 2002 and Shinkawa et al., J Biol Chem. 278(5):3466-73, 2003). An increase in the level of bisected carbohydrate, e.g. through recombinantly producing antibody in cells that overexpress GnTIII enzyme, has also been determined to increase ADCC activity (see Umana et al., Nat Biotechnol. 17(2):176-80, 1999).

[0389] In other embodiments, glycosylation of the antigen binding proteins described herein is decreased or eliminated by removing one or more glycosylation sites, e.g., from the Fc region of the binding protein. Amino acid substitutions that eliminate or alter N-linked glycosylation sites can reduce or eliminate N-linked glycosylation of the antigen binding protein. In certain embodiments, the bispecific antigen binding proteins described herein comprise a mutation at position N297 (EU numbering), such as N297Q, N297A, or N297G. In one particular embodiment, the bispecific antigen binding proteins of the invention comprise a Fc region from a human IgG1 antibody with a N297G mutation. To improve the stability of molecules comprising a N297 mutation, the Fc region of the molecules may be further engineered. For instance, in some embodiments, one or more amino acids in the Fc region are substituted with cysteine to promote disulfide bond formation in the dimeric state. Residues corresponding to V259, A287, R292, V302, L306, V323, or 1332 (EU numbering) of an IgG1 Fc region may thus be substituted with cysteine. In one embodiment, specific pairs of residues are substituted with cysteine such that they preferentially form a disulfide bond with each other, thus limiting or preventing disulfide bond scrambling. In certain embodiments pairs include, but are not limited to, A287C and L306C, V259C and L306C, R292C and V302C, and V323C and 1332C. In particular embodiments, the bispecific antigen binding proteins described herein comprise a Fc region from a human IgG1 antibody with mutations at R292C and V302C. In such embodiments, the Fc region may also comprise a N297G mutation.

[0390] Modifications of the antigen binding proteins of the disclosure to increase serum half-life also may desirable, for example, by incorporation of or addition of a salvage receptor binding epitope (e.g., by mutation of the appropriate region or by incorporating the epitope into a peptide tag that is then fused to the antigen binding proteins at either end or in the middle, e.g., by DNA or peptide synthesis; see, e.g., WO96/32478) or adding molecules such as PEG or other water soluble polymers, including polysaccharide polymers. The salvage receptor binding epitope preferably constitutes a region wherein any one or more amino acid residues from one or two loops of a Fc region are transferred to an analogous position in the antigen binding protein. In one embodiment, three or more residues from one or two loops of the Fc region are transferred. In one embodiment, the epitope is taken from the CH2 domain of the Fc region (e.g., an IgG Fc region) and transferred to the CH1, CH3, or VH region, or more than one such region, of the antigen binding protein. Alternatively, the epitope is taken from the CH2 domain of the Fc region and transferred to the CL region or VL region, or both, of the antigen binding protein. See International applications WO 97/34631 and WO 96/32478 for a description of Fc variants and their interaction with the salvage receptor.

[0391] The antigen binding proteins include variants having single or multiple amino acid substitutions, deletions, additions, or replacements that retain their biological properties. A person of ordinary skill in the art can produce variants having single or multiple amino acid substitutions, deletions, additions or replacements. These variants may include, inter alia: (a) variants in which one or more amino acid residues are substituted with conservative or non-conservative amino acids, (b) variants in which one or more amino acids are added to or deleted from the polypeptide, (c) variants in which one or more amino acids include a substituent group, and (d) variants in which the polypeptide is fused with another peptide or polypeptide such as a fusion partner, a protein tag or other chemical moiety, that may confer useful properties to the polypeptide, such as, for example, an epitope for an antibody, a polyhistidine sequence, a biotin moiety and the like. Antibodies and bispecific antibodies of the invention may include variants in which amino acid residues from one species are substituted for the corresponding residue in another species, either at the conserved or non-conserved positions. In another embodiment, amino acid residues at non-conserved positions are substituted with conservative or non-conservative residues. The techniques for obtaining these variants, including genetic (suppressions, deletions, mutations, etc.), chemical, and enzymatic techniques, are known to the person having ordinary skill in the art.

### Methods of Treatment

[0392] TREM-1 is implicated in cardiovascular indications. TREM-1 has been shown to be expressed in human atheromas and is upregulated under dyslipidemic conditions on circulating and on lesion-infiltrating myeloid cells in the Apoe−/− mouse model. It was demonstrated that Trem1^{-/-}Apoe^{-/-} mice exhibit attenuated diet-induced atherogenesis. (Zysset et al., Nat. Commun. 7:1-16, 2016). Boufenzer et al. (Circ. Res. 2015, 116:1772-1782) demonstrated that TREM1 Deficiency inhibits recruitment and activation of inflammatory cells to the infarcted myocardium, identifying that inhibition of TREM-1 using short peptides or gene knockout reduces myocardial infiltration of neutrophils, and improves heart function and survival after MI in mice and rats. In humans, TREM-1 activation, as evidenced by increased levels of sTREM-1, after MI is a predictor of mortality (Boufenzer et al., supra).

[0393] Lui et al. (Nat. Immunol 20:1023-1034., 2019) showed that peripheral myeloid cells magnify stroke injury via activation of TREM1. Neutrophils and macrophages infiltrating the brain highly express Trem1-activated by immunogenic cellular components, e.g., danger/damage-associated molecular patterns (DAMPs) (MCAo mouse model) (Colonna, M. Trends in Immun. 2019, 40: 781-783). Trem1 inhibition by decoy peptides or Trem-1 knockout exhibited decreased infiltration of neutrophils/macrophages into the site of injury, smaller infarct volumes, and improved neurological scores and increased survival (Lui et al, supra; Colonna, supra).

[0394] TREM-1 is also implicated in development of NAFLD/NASH. Rao et al., (J Cell Biochem 120:11867-11877, 2019) showed that overexpression of Trem1 in mouse hepatocytes resulted in increased lipid accumulation and genes involved in lipid uptake (e.g. Id/r, msr1) were upregulated when Trem1 was overexpressed. Additionally, genes involved in cholesterol efflux (e.g., abca1, abcg1) were downregulated when Trem1 was overexpressed. Oleic acid treatment of hepatocytes (HepG2, PMH) overexpressing Trem1 resulted in increased expression of inflammatory cytokines. Knockdown of TREM-1 using shRNA reduced lipid accumulation in mice on a high fat diet.

[0395] Obesity is characterized by chronic systemic inflammation (higher TNFα, IL6, and hsCRP), and TREM-1 has been shown to be increased in obese patients. It is hypothesized herein that therapy with anti-TREM1, optionally in combination with anti-obesity drugs, would lead to a greater reduction in systemic inflammation.

[0396] It is contemplated herein that antigen binding proteins specific for TREM-1 disclosed herein are useful to treat cardiovascular diseases. Exemplary cardiovascular diseases include myocardial infarction, non-alcoholic fatty liver disease (NAFLD), non-alcoholic steatohepatitis (NASH), heart failure, stroke (ischemic and hemorrhagic), atherosclerosis, coronary artery disease, peripheral vascular disease (e.g. peripheral artery disease), vulnerable plaque, acute coronary syndrome, cerebrovascular disease, cerebrovascular atherosclerosis and obesity.

[0397] In certain embodiments, measurement of TNF-α suppression is carried out using isolated PBMC. PBMC are isolated from blood of a subject (human, mouse, rat, cynomolgus monkey, and the like), stimulated in vitro with LPS or TREM-1 ligand (Peptidoglycan recognition protein complexed with bacterial peptidoglycan) and levels of TNFα before and after stimulation, and in the presence of different test molecules, are determined using, for examples an ELISA, ALPHALISA or MSD Vplex TNFα detection kit.

[0398] In one embodiment, the disclosure provides a method of inhibiting one or more of proinflammatory cytokines, e.g., TNFα, in a mammal in need of such treatment comprising administering a therapeutically effective amount of an antigen binding protein or antibody of the disclosure, to a subject in need of such treatment. In a preferred embodiment, the subject is a mammal. In one embodiment, the subject is a human. The method may be used to treat a disorder characterized by elevated expression or activity of TNFα. The antigen binding protein or antibody of the disclosure, may be administered with another pharmaceutical agent, either in the same formulation or separately.

[0399] Additional assays contemplated include measuring the concentration of high sensitivity C-reactive protein, concentration of soluble TREM-1, ex-vivo analysis of phosphorylated spleen tyrosine kinase in isolated PBMCs, and analysis of myeloid cell subsets.

[0400] It is contemplated that the treatment reduces the levels of inflammatory cytokines such as TNF-α and IL-6 in the subject.

[0401] It is contemplated that treatment with an anti-TREM-1 antigen binding protein of the disclosure comprising an anti-TREM-1 binding protein reduces expression of TREM-1 in inflammatory cells.

### Administration and Dosing

[0402] Methods of the present disclosure include a step of administering a pharmaceutical composition comprising an antigen binding protein described herein. In certain embodiments, the pharmaceutical composition is a sterile composition.

[0403] The amounts of therapeutic composition in a given dosage may vary according to the size of the individual to whom the therapy is being administered as well as the characteristics of the disorder being treated.

[0404] The present disclosure provides a composition comprising an antigen binding protein or antibody of the disclosure and a pharmaceutically acceptable carrier. A pharmaceutical composition comprising an antigen binding protein or antibody of the disclosure can be formulated according to known methods to prepare pharmaceutically useful compositions, whereby the therapeutic antibodies are combined in a mixture with a pharmaceutically acceptable carrier. A composition is said to comprise a “pharmaceutically acceptable carrier” if its administration can be tolerated by a recipient patient. Sterile phosphate-buffered saline is one example of a pharmaceutically acceptable carrier. Other suitable carriers are well-known to those in the art. See, for example, Getman), ed., Remington's Pharmaceutical Sciences, 19th Edition, Mack Publishing Company (1995).

[0405] For pharmaceutical use, polypeptides of the present disclosure are formulated for parenteral, particularly intravenous or subcutaneous, delivery according to conventional methods. Intravenous administration may be by bolus injection, controlled release, e.g., using mini-pumps or other appropriate technology, or by infusion over a typical period of one to several hours. In general, pharmaceutical formulations will include an antigen binding protein or antibody of the disclosure, in combination with a pharmaceutically acceptable carrier, such as saline, buffered saline, 5% dextrose in water or the like. Formulations may further include one or more excipients, preservatives, solubilizers, buffering agents, albumin to prevent protein loss on vial surfaces, etc. When utilizing such a combination therapy, antigen binding protein or antibody of the disclosure, may be combined in a single formulation or may be administered in separate formulations. Methods of formulation are well known in the art and are disclosed, for example, in Gennaro, ed., Remington's Pharmaceutical Sciences, Mack Publishing Co., Easton Pa. (1990), which is incorporated herein by reference. Therapeutic doses will generally be in the range of 0.1 to 100 mg/kg of patient weight per day, preferably 0.5-20 mg/kg per day, with the exact dose determined by the clinician according to accepted standards, taking into account the nature and severity of the condition to be treated, patient traits, etc. Determination of dose is within the level of ordinary skill in the art. More commonly, the antibodies will be administered over one week or less, often over a period of one to three days. Generally, the dosage of administered antibodies will vary depending upon such factors as the patient's age, weight, height, sex, general medical condition and previous medical history. Typically, it is desirable to provide the recipient with a dosage of antibodies which is in the range of from about 1 pg/kg to 10 mg/kg (amount of agent/body weight of patient), although a lower or higher dosage also may be administered as circumstances dictate.

[0406] Administration of an antigen binding protein or antibody of the disclosure, to a subject can be intravenous, intraarterial, intraperitoneal, intramuscular, subcutaneous, intrapleural, intrathecal, by perfusion through a regional catheter, or by direct intralesional injection. In various embodiments the administration is intravenous or subcutaneous. When administering antigen binding proteins by injection, the administration may be by continuous infusion or by single or multiple boluses.

[0407] Additional routes of administration include oral, mucosal-membrane, pulmonary, and transcutaneous. Oral delivery is suitable for polyester microspheres, zein microspheres, proteinoid microspheres, polycyanoacrylate microspheres, and lipid-based systems (see, for example, DiBase et al., “Oral Delivery of Microencapsulated Proteins”, in Sanders et al., eds., Protein Delivery: Physical Systems, pp. 255-288, Plenum Press (1997)). The feasibility of an intranasal delivery is exemplified by such a mode of insulin administration (see, for example, Hinchcliffe et al., Adv. Drug Deliv. Rev., 35:199 (1999)). Dry or liquid particles comprising antibodies of the invention can be prepared and inhaled with the aid of dry-powder dispersers, liquid aerosol generators, or nebulizers (e.g., Pettit et al., TIBTECH, 16:343 (1998); Patton et al., Adv. Drug Deliv. Rev., 35:235 (1999)). This approach is illustrated by the AERX® diabetes management system, which is a hand-held electronic inhaler that delivers aerosolized insulin into the lungs. Studies have shown that proteins as large as 48,000 kDa have been delivered across skin at therapeutic concentrations with the aid of low-frequency ultrasound, which illustrates the feasibility of transcutaneous administration (Mitragotri et al., Science, 269:850 (1995)).

[0408] For purposes of therapy, compositions comprising an antigen binding protein or antibody of the disclosure and a pharmaceutically acceptable carrier are administered to a patient in a therapeutically effective amount. A combination of antigen binding protein or antibody of the disclosure and a pharmaceutically acceptable carrier is said to be administered in a “therapeutically effective amount” if the amount administered is physiologically significant. An agent is physiologically significant if its presence results in a detectable change in the physiology of a recipient patient. For example, an agent used to treat inflammation is physiologically significant if its presence alleviates the inflammatory response. Effective treatment may be assessed in a variety of ways. In one embodiment, effective treatment is determined by reduced inflammation. In other embodiments, effective treatment is marked by inhibition of inflammation. In still other embodiments, effective therapy is measured by increased well-being of the patient including such signs as weight gain, regained strength, decreased pain, thriving, and subjective indications from the patient of better health.

[0409] It is contemplated that the antigen binding protein, e.g., comprising anti-TREM-1 antibody sequences, is administered at a dose of 30 mg, 40 mg, 50 mg, 60 mg, 70 mg, 80 mg, 90 mg, 100 mg, 125 mg, 150 mg, 200 mg, 250 mg, 300 mg or more. In various embodiments, antigen binding protein, e.g., comprising anti-TREM-1 antibody sequences, is administered at a dose of about 0.05 mg/kg, 0.25 mg/kg, 0.5 mg/kg, 0.75 mg/kg, 1.0 mg/kg, 1.25 mg/kg, 1.5 mg/kg, 2.0 mg/kg, 2.5 mg/kg, 3.0 mg/kg, 3.5 mg/kg, 4.0 mg/kg, 4.5 mg/kg or 5 mg/kg.

[0410] Compositions described herein are administered once weekly, twice weekly, once every two weeks, once every three weeks, once every 4 weeks, once monthly, once every 3 months, once every six months, or once yearly.

[0411] A pharmaceutical composition comprising an antigen binding protein or antibody of the disclosure can be furnished in liquid form, in an aerosol, or in solid form. Liquid forms, are illustrated by injectable solutions and oral suspensions. Exemplary solid forms include capsules, tablets, and controlled-release forms. The latter form is illustrated by miniosmotic pumps and implants (Bremer et al., Pharm. Biotechnol., 10:239 (1997); Ranade, “Implants in Drug Delivery”, in Ranade et al., eds., Drug Delivery Systems, pp. 95-123, CRC Press (1995); Bremer et al., “Protein Delivery with Infusion Pumps”, in Sanders et al., eds., Protein Delivery: Physical Systems, pp. 239-254, Plenum Press (1997); Yewey et al., “Delivery of Proteins from a Controlled Release Injectable Implant”, in Sanders et al., eds., Protein Delivery: Physical Systems, pp. 93-117, Plenum Press (1997).

[0412] The formulation can also contain more than one active compound as necessary for the particular indication being treated, preferably those with complementary activities that do not adversely affect each other. Alternatively, or in addition, the composition can comprise an agent that enhances its function, such as, for example, a cytotoxic agent, cytokine, chemotherapeutic agent, or growth-inhibitory agent. Such molecules are suitably present in combination in amounts that are effective for the purpose intended.

[0413] In one embodiment, an antigen binding protein or antibody of the disclosure is administered in combination therapy, i.e., combined with other agents, e.g., therapeutic agents, that are useful for treating pathological conditions or disorders, such as cardiovascular diseases. The term “in combination” in this context means that the agents are given substantially contemporaneously, either simultaneously or sequentially. If given sequentially, at the onset of administration of the second compound, the first of the two compounds is preferably still detectable at effective concentrations at the site of treatment.

[0414] It is contemplated the therapeutic agents of the present disclosure may be given simultaneously, in the same formulation. It is further contemplated that the agents are administered in a separate formulation and administered concurrently, with concurrently referring to agents given within 30 minutes of each other. It is further contemplated that a second agent may be given simultaneously.

[0415] In another aspect, an antigen binding protein as described herein is administered prior to administration of a second composition. Prior administration refers to administration of an agent within the range of one week prior to treatment with the other agent, up to 30 minutes before administration of the other agent. It is further contemplated that an agent is administered subsequent to administration of another composition or agent. Subsequent administration is meant to describe administration from 30 minutes after antibody treatment up to one week after antibody administration, e.g., 30 minutes, 1 hour 2 hours, 4 hours, 1 day, 2 days, etc. It is further contemplated that a second

[0416] For example, the combination therapy can include one or more antigen binding protein or antibody of the disclosure co-formulated with, and/or co-administered with, one or more additional therapeutic agents, e.g., one or more cholesterol-lowering (serum and/or total body cholesterol) agent, an agent that increases the expression of LDLR, statins (atorvastatin, cerivastatin, fluvastatin, lovastatin, mevastatin, pitavastatin, pravastatin, rosuvastatin, simvastatin), PCSK9 inhibitors (Repatha®, Praluent®, Leqvio®) nicotinic acid (Niacin) (NIACOR®, NIASPANG (slow release niacin), SLO-NIACIN® (slow release niacin), Fibric acid (LOPID® (gemfibrozil), TRICOR® (fenofibrate), Bile acid sequestrants (QUESTRAN® (cholestyramine), colesevelam (WELCHOL®), COLESTID® (colestipol), Cholesterol absorption inhibitors (Zetia (ezetimibe)), combining nicotinic acid with statin (ADVICOR® (LOVASTATIN and NIASPAN®), combination of a statin with an absorption inhibitor (VYTORIN (ZOCOR® and ZETIA®) and/or lipid modifying agents like PCSK9 inhibitors, PPAR gamma agonists, PPAR alpha/gamma agonists, squalene synthase inhibitors, cholesterylester transfer protein (CETP) inhibitors, anti-hypertensives, anti-thrombotics (aspirin) anti-diabetic agents (such as sulphonyl ureas, insulin, GLP-1 analogs, DDPIV inhibitors, SGL2 inhibitors), ApoB modulators, MTP inhibitors, Corlanorg (ivabradine) I(f) current Inhibitor, omecamtiv mecarbil cardiac myosin activator, OLPASIRAN (AMG890) (siRNA) that lowers lipoprotein(a), AMG 594 cardiac troponin activator, AMG 609, AMG 171 (Growth Differential Factor 15 (GDF15) analog), AMG 133 (gastric inhibitory polypeptide receptor (GIPR) antagonist and glucagon-like peptide 1 (GLP-1) receptor agonist), and/or arteriosclerosis obliterans treatments.

[0417] Therapeutic agents used in combination with an antigen binding protein or antibody of the disclosure include agents that interfere at different stages in an inflammatory response. In one embodiment, an antigen binding protein or antibody of the disclosure, may be co-formulated with, and/or co-administered with, one or more additional agents such as other cytokine or growth factor antagonists (e.g., soluble receptors, peptide inhibitors, small molecules, ligand fusions); or antibodies or antigen binding fragments thereof that bind to other targets (e.g., antibodies that bind to other cytokines or growth factors, their receptors, or other cell surface molecules); and anti-inflammatory cytokines or agonists thereof. Non-limiting examples of the agents that can be used in combination with the antibodies described herein, include, but are not limited to, antagonists of one or more interleukins (ILs) or their receptors, e.g., antagonists of IL-1, IL-2, IL-6, IL-7, IL-8, IL-12, IL-13, IL-15, IL-16, IL17A-F, IL-18, IL-20, IL-21, IL-22, IL-23 IL-25, IL-31, IL-32, IL-33; antagonists of cytokines or growth factors or their receptors, such as, LT, EMAP-II, GM-CSF, FGF and PDGF. Antibodies of the invention can also be combined with inhibitors of e.g., antibodies to, cell surface molecules such as CD2, CD3, CD4, CD8, CD20 (e.g., the CD20 inhibitor rituximab (RITUXAN®), CD25, CD28, CD30, CD40, CD45, CD69, CD80 (B7.1), CD86 (B7.2), CD90, or their ligands, including CD154 (gp39 or CD40L), or LFA-1/ICAM-1 and VLA-4/VCAM-1 (Yusuf-Makagiansar et al., Med. Res. Rev., 22:146-167 (2002)). Exemplary antagonists that can be used in combination include antagonists of IL-1, IL-6, IL-12, TNFα, IL-15, IL-18, IL-20, IL-22, IL-23 and IL-31.

[0418] In other embodiments, one or more antigen binding proteins of the disclosure can be co-formulated with, and/or co-administered with, one or more anti-inflammatory drugs, immunosuppressants, or metabolic or enzymatic inhibitors. Non-limiting examples of the drugs or inhibitors that can be used in combination with the antibodies described herein, include, but are not limited to, one or more of: nonsteroidal anti-inflammatory drug(s) (NSAIDs), e.g., ibuprofen, tenidap, naproxen, meloxicam, piroxicam, diclofenac, and indomethacin; sulfasalazine; corticosteroids such. as prednisolone; cytokine suppressive anti-inflammatory drug(s) (CSAIDs); inhibitors of nucleotide biosynthesis, e.g., inhibitors of purine biosynthesis, folate antagonists (e.g., methotrexate (N-[4-[[(2,4-diamino-6-pteridinyl)methyl]methylamino]benzoyl]-glutamic acid); and inhibitors of pyrimidine biosynthesis, e.g., dihydroorotate dehydrogenase (DHODH) inhibitors. Preferred therapeutic agents for use in combination with one or more antibodies, e.g., bispecific antibodies, of the invention include NSAIDs, CSAIDs, (DHODH) inhibitors (e.g., leflunomide), and folate antagonists (e.g., methotrexate.

[0419] Additional inhibitors include one or more of: corticosteroids (oral, inhaled and local injection); immunosuppressants, e.g., cyclosporin, tacrolimus (FK-506); and mTOR inhibitors, e.g., sirolimus (rapamycin—RAPAMUNE® or rapamycin derivatives, e.g., soluble rapamycin derivatives (e.g., ester rapamycin derivatives, e.g., CCI-779); agents which interfere with signaling by proinflammatory cytokines such as IL-1 (e.g., IRAK, NIK, IKK, p38 or MAP kinase inhibitors); COX2 inhibitors, e.g., celecoxib, rofecoxib, and variants thereof; phosphodiesterase inhibitors, e.g., R973401 (phosphodiesterase Type IV inhibitor); phospholipase inhibitors, e.g., inhibitors of cytosolic phospholipase 2 (cPLA2) (e.g., trifluoromethyl ketone analogs); inhibitors of vascular endothelial cell growth factor or growth factor receptor, e.g., VEGF inhibitor and/or VEGF-R inhibitor; and inhibitors of angiogenesis. Preferred therapeutic agents for use in combination with an antigen binding protein or antibody of the disclosure are immunosuppressants, e.g., cyclosporin, tacrolimus (FK-506); mTOR inhibitors, e.g., sirolimus (rapamycin) or rapamycin derivatives, e.g., soluble rapamycin derivatives (e.g., ester rapamycin derivatives, e.g., CCI-779); COX2 inhibitors, e.g., celecoxib and variants thereof; and phospholipase inhibitors, e.g., inhibitors of cytosolic phospholipase 2 (cPLA2), e.g., trifluoromethyl ketone analogs.

### Kits

[0420] The disclosure also contemplates a kit comprising one or more containers that comprises an antigen binding protein or antibody of the disclosure, optimally in a pharmaceutically acceptable carrier or composition. The antigen binding protein or antibody of the disclosure can be provided in the form of an injectable solution for single or multiple doses, as a unit dose, or as a sterile powder that will be reconstituted before injection. Alternatively, such a kit can include a dry-powder disperser, liquid aerosol generator, or nebulizer for administration of the therapeutic agent(s). Such a kit may further comprise instructions and written information on indications and usage of the pharmaceutical composition.

[0421] Syringes, e.g., single use or pre-filled syringes, sterile sealed containers, e.g. vials, bottle, vessel, and/or kits or packages comprising any of the foregoing antigen binding proteins or compositions, optionally with suitable instructions for use, are also contemplated.

[0422] In a further embodiment, the invention provides an article of manufacture, or unit dose form, comprising: (a) a composition of matter comprising an antigen binding protein or antibody of the disclosure; (b) a container containing said composition; and (c) a label affixed to said container, or a package insert included in said container referring to the use of said antibody in the treatment of an immune related disease.

[0423] In another aspect, the composition or kit comprises a further active ingredient, which may, for example, be a further antibody or an anti-inflammatory, cytotoxic or other agent described herein. Preferably, the composition is sterile.

### Examples

### Example 1-Anti-TREM-1 Antibodies

[0424] High affinity anti-TREM-1 monoclonal antibodies were generated and assessed for the ability to target to immune cells and modulate signaling between TREM-1 and its ligand(s).

[0425] Fully human antibodies to human TREM-1 were generated by immunizing XENOMOUSE® transgenic mice. See for example, U.S. Pat. Nos. 6,114,598; 6,162,963; 6,833,268; 7,049,426; and 7,064,244.

[0426] Mice were immunized with human and/or cyno TREM1 protein, TREM1 expression vectors and/or TREM1 expressing CHO cells. For genetic immunizations, mice were immunized 16 times over 8 weeks using the HELIOS® Gene Gun system according to the manufacturer's instructions (BioRad, Hercules, California). Briefly, expression vectors encoding either human TREM-1 and DAP12, or cyno TREM-1 and DAP12, were pooled and 2 pg total DNA were coated onto 1.6 um gold beads (BioRad, Hercules, California) and delivered to the epidermis of a shaved mouse abdomen. For soluble protein immunizations, mice were immunized with human or cyno TREM-1 recombinant protein representing the N-terminal extracellular domain. Animals were immunized with recombinant protein adjuvanted with either Alum and CpG-ODN or Sigma Adjuvant System, 14-17 times over 10-12 weeks using subcutaneous injections delivered at two locations along the dorsal midline of the mice located at the base of tail and subscapular region. The initial soluble protein immunization delivered 10 pg and subsequent boosts were 5 pg. For cell immunizations, mice were immunized with 2-4 million CHO-S cells transiently expressing either human TREM-1 or cyno TREM-1 adjuvanted with Alum and CpG-ODN. Animals were immunized 1 or 2 times weekly for a total of 13 times over 10 weeks alternating between intraperitoneal and subcutaneous injections at the base of tail. Animals were bled, and plasma collected at various time points during the immunization studies ranging from 4 weeks to 10 weeks to assess for TREM1-specific titers. TREM1-specific plasma titers were monitored by live-cell FACS analysis on an ACCURI™ flow cytometer (BD Biosciences), using transiently transfected 293T cells. Animals with the highest antigen-specific plasma titers against human and cyno TREM1 were sacrificed and used for hybridoma generation (Kohler and Milstein, 1975)

[0427] Hybridoma Generation: Animals exhibiting suitable antigen-specific serum titers were identified and spleen and/or draining lymph nodes from select mice were pooled from each harvest. Splenocytes and lymphocytes were dissociated from lymphoid tissue by grinding in a suitable medium or using the GENTLEMACS™ Dissociator (Miltenyi Biotec) semi-automated tissue dissociation instrument. IgG-expressing B cells were isolated, expanded using standard methods, and fused with a suitable cell fusion partner. Hybridoma supernatants were tested for binding to human TREM-1 transiently expressed on HEK293 cells by CELLINSIGHT™. Briefly, HEK293 cells were transiently co-transfected with a 1:1 ratio of mammalian expression constructs encoding human TREM-1 and DAP12, or mock vector and DAP12 alone using 293Fectin (Invitrogen) following the manufacturer's protocol. The following day, 15,000 cells/well of transfected HEK293 cells were combined with an equal volume of exhausted hybridoma media test samples and nuclear stain Hoechst 33342 (Pierce) at 15 pg/mL final concentration, at a total volume of 30 μL/well in 384-well FMAT plates (Corning). After 1 hour incubation at room temperature, the supernatant was aspirated using an AQUAMAX® plate washer, and wells were washed for 2 cycles using 50 pL/well of FACS buffer (PBS (Hyclone), 2% FBS (Sigma)) each cycle on the AquaMax. Cells were stained with 5 Pg/mL Alexa Fluor 488 Goat anti-Human IgG Fc (Jackson ImmunoResearch) secondary antibody, shaken on a Big Bear plate shaker, and incubated at room temperature for 20 minutes. The supernatant was aspirated using an AQUAMAX® plate washer, wells were again washed for 2 cycles using 50 pL/well of FACS buffer, and 30 μL of FACS buffer was added to each well using a multidrop instrument. The plates were placed on a Big Bear Plate shaker to evenly distribute the cells in the wells, and then read on the CELLINSIGHT™CX7 platform using the Cell Health Profiling Bio-App.

[0428] The TREM-1-specific antibodies identified in primary screening were evaluated for cross-reactivity to cynomolgus TREM-1, as well as specificity to TREM-1 and not DAP12. TREM-1 hybridoma supernatants were tested for binding to human or cyno TREM-1 transiently expressed on HEK293 cells by FACS (harvests 1-6) or by CELLINSIGHT™ (harvests 8-9). For TREM1 antibodies from harvests 1-6, HEK293 cells were transiently co-transfected with a 1:1 ratio of mammalian expression constructs encoding human TREM-1 and DAP12, cyno TREM-1 and DAP12, or mock vector and human DAP12 using 293Fectin. The following day, transfected HEK293 cells were transferred into 96-well FACS plates at 50,000 cells/well and incubated with normalized hybridoma supernatants at a final concentration of 2.5 μg/mL for 1 hour at 4° C. Cells were then pelleted by centrifugation, supernatant was removed by flicking, and wells were washed twice with 200 μL/well of FACS buffer. 5 μg/mL ALEXA FLUOR® 647 Goat anti-Human IgG Fc (Jackson ImmunoResearch) secondary detection antibody and 2.5 μg/mL 7-aminoactinomycin-D (Sigma) viability stain were incubated with the cells for 15 minutes at 4° C. Cells were pelleted by centrifugation, supernatant was removed by flicking, and wells were washed once more with 200 μL/well of FACS buffer. TREM-1 hybridoma supernatants showing human TREM-1- or cyno TREM-1-specific binding was detected by FACS on the BD ACCURI™ 06 flow cytometer with Intellicyt autosampler. The data was reported as geomean (GM) fold over irrelevant control antibody binding. Results of binding for certain anti-TREM-1 antibodies is shown in Table 1.

TABLE 1
TREM1 antibodies in human/cyno cross-
reactivity and specificity screen

| Antibody ID | Human TREM1 GM Fold | Cyno TREM1 GM Fold |
|---|---|---|
| 3E12 | 279.6 | 176.5 |
| 34D1 | 245.8 | 228.1 |
| 30H2 | 108.1 | 76.9 |
| 44A5 | 1634.6 | 2238.4 |
| 46H7 | 1907.9 | 2688.8 |
| 49A2 | 2218.0 | 2978.4 |
| 50A12 | 2421.0 | 2782.1 |
| 57C10 | 1667.8 | 2429.0 |
| 57F5 | 718.8 | 2338.9 |
| 61B12 | 1850.3 | 2093.4 |
| 61G5 | 2072.8 | 2160.6 |
| 63F8 | 1384.3 | 2372.3 |
| 64D7 | 1476.6 | 2151.3 |
| 66B8 | 1634.0 | 1517.9 |

[0429] The TREM1 antibodies demonstrating high quality TREM1-specific binding and human/cyno cross-reactivity were evaluated for their ability to block ligand PGLYRP1 from binding to human TREM1/DAP12 transiently expressed on HEK293 cells. Briefly, HEK293 cells were transiently co-transfected with a 1:1 ratio of mammalian expression constructs encoding human TREM1 and DAP12, or mock vector and human DAP12 using 293Fectin. The following day, transfected HEK293 cells were transferred into 96-well FACS plates at 50,000 cells/well and incubated with normalized hybridoma supernatants at a final concentration of 2.5 μg/mL for 1 hour at 4° C. Human PGLYRP1-His (R&D Systems) was combined with PGN-ECndss (peptidoglycan, InvivoGen) and incubated at room temperature for 15 minutes, then added to the wells at a final concentration of 7.5 μg/mL PGLYRP1 and 30 μg/mL PGN. The plates were then shaken and incubated for 15 minutes at 4° C. Cells were then pelleted by centrifugation, supernatant was removed by flicking, and wells were washed with 200 μL of FACS buffer. 5 μg/mL ALEXA FLUOR® 647 human anti-His secondary detection antibody and 2.5 μg/mL 7-aminoactinomycin-D (Sigma) viability stain were added to the cells, shaken, and incubated for 15 minutes at 4° C. Cells were washed with FACS buffer, pelleted by centrifugation, supernatant was removed by flicking, and washed once more with FACS buffer. Cells were then run on the BD ACCURI™C6 Flow Cytometer with Intellicyt HYPERCYT® autosampler. A total of 518 TREM1 antibodies showed the desired specific PGLYRP1-blocking activity. Receptor-ligand inhibition for select TREM-1 monoclonal antibodies are summarized in Table 2.

TABLE 2
Receptor-ligand inhibition for select TREM1 antibodies

| Antibody ID | Receptor-ligand % inhibition |
|---|---|
| 3E12 | 101% |
| 34D1 | 101% |
| 30H2 | 101% |
| 44A5 | 100% |
| 46H7 | 100% |
| 49A2 | 100% |
| 50A12 | 100% |
| 57C10 | 100% |
| 57F5 | 100% |
| 61B12 | 87% |
| 61G5 | 91% |
| 63F8 | 93% |
| 64D7 | 96% |
| 66B8 | 85% |

[0430] TREM-1 Antibody Relative Affinity Ranking by Limiting Antigen Assay: TREM1 hybridoma supernatants were affinity-ranked within the panel by their binding kinetics to soluble TREM-1 in a limiting antigen assay using LUMAVIDIN® beads (Luminex) on FACS. Briefly, in-house biotinylated human TREM-1-His antigen (b-huTREM-1-His) was serially diluted in FACS buffer and combined with an equal volume of LUMAVIDIN® beads (different uniquely-barcoded bead for each antigen concentration), resulting in a 5-point 2-fold serial dilution series starting from a final b-huTREM-1-His antigen concentration of 30 ng/mL. The antigen-bead mixtures were plated across 3 wells in a 96-well FACS plate, then incubated for 30 minutes at room temperature protected from light. Beads were then pelleted by centrifugation, supernatant was removed by flicking, and wells were washed twice with 200 μL/well of FACS buffer. The different beads were then resuspended, pooled, and diluted in STABILGUARD® Immunoassay Stabilizer (SurModics) to block non-specific binding. Normalized TREM-1 hybridoma supernatants were combined with an equal volume of bead mixture in a FACS plate at a final concentration of 5 μg/mL test antibody to 0.5 μL beads/well. The plates were then shaken and incubated overnight for ˜18 hours at room temperature. Beads were then pelleted by centrifugation, supernatant was removed by flicking, and wells were washed twice with 200 μL/well of FACS buffer. ALEXA FLUOR® 488 Goat anti-Human IgG Fc secondary detection antibody (Jackson ImmunoResearch) was added at 5 μg/mL to the plates, shaken, and incubated for 15 minutes at room temperature protected from light. Beads were washed with FACS buffer, pelleted by centrifugation, supernatant was removed by flicking, and washed once more with FACS buffer. The beads were then resuspended and run on the BD ACCURI™ C6 Flow Cytometer with Intellicyt HYPERCYT® autosampler.

[0431] TREM-1 hybridoma samples showing at least two times or greater signal over control IgG antibody samples were considered to be exhibiting TREM-1-specific binding profiles. The antibody binding signal correlates with antibody affinity; the degree of antibody binding to the target antigen TREM-1 correlates with the measured fluorescent intensity and thus allows a relative comparison of affinities across the panel. TREM-1 antibodies with better binding in limiting antigen screens than the benchmark antibody 1B2 were advanced to light chain sequencing and human/cyno affinity gap analysis. Table 3 shows the antibody binding data for select TREM-1 antibodies using a representative antigen coating concentration that fell within the linear range of the instrument signal detection

TABLE 3
Relative affinities of select TREM1 antibodies
in limited antigen binding assays

| Antibody ID | Soluble TREM1 7.5 ng/mL (FACS Geomean) |
|---|---|
| 3E12 | 121096 |
| 34D1 | 80444 |
| 30H2 | 91743 |
| 44A5 | 36759 |
| 46H7 | 37975 |
| 49A2 | 28315 |
| 50A12 | 14642 |
| 57C10 | 28498 |
| 57F5 | 25282 |
| 61B12 | 26854 |
| 61G5 | 24835 |
| 63F8 | 25759 |
| 64D7 | 24511 |
| 66B8 | 23784 |

[0432] TREM1 Relative Epitope Binning/Profiling: TREM1 hybridoma supernatants were assessed by epitope binning assay (a modified antibody-antibody competition assay) using LUMAVIDIN® beads (Luminex) on FACS to determine the variety of relative unique epitope bins in the panel. Briefly, a set of 15 different uniquely-barcoded LUMAVIDIN® beads were each combined with an equal volume of in-house biotinylated human TREM-1-His antigen diluted in FACS buffer at a final concentration of 100 ng/mL. The antigen-bead mixtures were plated across 3 wells in a 96-well FACS plate, then incubated for 30 minutes at room temperature protected from light. Beads were then pelleted by centrifugation, supernatant was removed by flicking, and wells were washed twice with 200 μL/well of FACS buffer. 15 different TREM-1 antibodies with diverse VDJ rearrangements and good quantitation that had shown good binding in the limiting antigen assay were chosen as reference antibodies for pre-coating the beads. These 15 antibodies were prepared at a saturating concentration of 5 μg/mL in FACS buffer and incubated with each of the 15 different LUMAVIDIN® beads for 1 hour at room temperature protected from light. Beads were pelleted by centrifugation, supernatant was removed by flicking, and wells were washed three times with 200 μL/well of FACS buffer. The different beads were then resuspended, pooled, and diluted in STABILGUARD® Immunoassay Stabilizer (SurModics) to block non-specific binding. Normalized TREM-1 hybridoma supernatants (test antibodies) were combined with an equal volume of bead mixture in a FACS plate at a final concentration of 5 μg/mL test antibody to 0.5 μL beads/well. The plates were then shaken and incubated for 1 hour at room temperature protected from light. Beads were then pelleted by centrifugation, supernatant was removed by flicking, and wells were washed twice with 200 μL/well of FACS buffer. ALEXA FLUOR® 488 Goat anti-Human IgG Fc secondary detection antibody (Jackson ImmunoResearch) was added at 5 μg/mL to the plates, shaken, and incubated for 15 minutes at room temperature protected from light. Beads were washed with FACS buffer, pelleted by centrifugation, supernatant was removed by flicking, and washed once more with FACS buffer. The beads were then resuspended and run on the BD ACCURI™ C6 Flow Cytometer with Intellicyt HYPERCYT® autosampler.

[0433] Test antibodies competing to a similar epitope on the TREM-1 antigen as the reference antibodies are prevented from binding while non-competing antibodies are able to bind generating an additive signal with the reference antibody. The total bound antibodies are then detected with the secondary antibody. To determine the antibody competition/binding profiles of the individual test antibodies, the reference-only antibody binding signal was subtracted from the reference plus test antibody signal for each competition/binding reaction (i.e., across the entire reference antibody set). A summary of the relative epitope binning for select TREM-1 antibodies is shown below in Table 4.

TABLE 4
Relative epitope bins for select top TREM1 antibodies

| Antibody ID | Epitope Bin |
|---|---|
| 3E12 | B |
| 34D1 | ND |
| 30H2 | ND |
| 44A5 | A |
| 46H7 | A |
| 49A2 | A |
| 50A12 | A.1 |
| 57C10 | A |
| 57F5 | A |
| 61B12 | A |
| 61G5 | A |
| 63F8 | A |
| 64D7 | A |
| 66B8 | A |

[0434] TREM1 Antibody Human/Cynomolgus Affinity Gap Determination: TREM-1 antibodies with unique CDR3 sequences that had also shown better binding in limiting antigen screens than the benchmark antibody were analyzed for their affinity to human and cyno TREM-1. The binding affinity K_{D} (M), association rate constant kₐ (M⁻¹s⁻¹⁻), and dissociation rate constant k_{d} (s⁻¹), were determined on a panel of 114 TREM-1 antibodies using the OCTET® HTX instrument (Fortebio). Briefly, TREM-1 hybridoma supernatants normalized to 10 μg/mL in DMEM null media were prepared by diluting 1:10 in OCTET® assay buffer (10 mM Tris, 0.1% Triton X-100, 150 mM NaCl, 1 mM CaCl₂, 0.1 mg/mL BSA, at pH 7.6) to a final test concentration of 1 μg/mL. Amine reactive second-generation AR2G Biosensors (Molecular Devices) were pre-incubated in 200 μL nanopore water for a minimum of 10 minutes at room temperature before use. The AR2G Biosensors were then activated for 5 minutes in a solution of 20 mM EDC (1-Ethyl-3-[3-dimethylaminopropyl] carbodiimide hydrochloride) (ForteBio) pre-mixed with 10 mM NHS (N-hydroxysulfosuccinimide) (ForteBio) in nanopore water. An in-house generated mouse anti-human Fc monoclonal antibody was coupled to the AR2G Biosensors at 10 μg/mL in 10 mM sodium acetate buffer at pH 5 for 5 minutes, quenched with 1M ethanolamine at pH 8.5 for 5 minutes, and then used to capture antibody from solution. The TREM-1 test antibodies were loaded onto the Biosensors for 5 minutes, and baseline measurements were taken for 1 minute. The recombinant soluble human TREM-1-His protein was then bound to the antibody-loaded Biosensors in a 3-fold dilution series covering 6 points from 450 nM to 1.85 nM or 150 nM to 0.62 nM. The association of recombinant human TREM-1 with the antibody-loaded sensor was measured for 5 minutes, followed by dissociation in OCTET® buffer for 10 minutes. Biosensors were then regenerated with 10 mM glycine at pH 1.7, reloaded with the same TREM-1 antibodies on the same sensors for 5 minutes, and the same method was used to measure association and dissociation of cyno TREM-1-His protein. Data was referenced using a 0 nM analyte reference sensor. Kinetic analysis was performed using a 1:1 Langmuir model with mass transfer in Genedata Screener software. TREM-1 antibodies that met design goals and showed an affinity difference of less than 10-fold between human and cyno TREM-1 were identified, and their binding affinities are displayed in Table 5.

TABLE 5
TREM1 antibodies with <10-fold human and cyno TREM-1 affinity gap

| Antibody | Binding affinity for human TREM1 | | | Binding affinity for cyno TREM1 | | |
|---|---|---|---|---|---|---|
| ID | K_{D} (M) | kₐ (M⁻¹s⁻¹⁻) | k_{d} (s⁻¹) | K_{D} (M) | kₐ (M⁻¹s⁻¹⁻) | k_{d} (s⁻¹) |
| 3E12 | 5.70E−10 | 4.62E+05 | 2.63E−04 | 1.80E−09 | 4.89E+05 | 8.82E−04 |
| 34D1 | 8.81E−10 | 2.33E+05 | 2.05E−04 | 4.97E−09 | 2.58E+05 | 1.28E−03 |
| 30H2 | 8.98E−10 | 3.26E+05 | 2.93E−04 | 5.70E−09 | 2.14E+05 | 1.22E−03 |
| 44A5 | 4.04E−10 | 4.51E+05 | 1.82E−04 | 2.02E−09 | 7.51E+05 | 1.52E−03 |
| 46H7 | 4.57E−10 | 7.37E+05 | 3.36E−04 | 9.93E−10 | 1.14E+06 | 1.13E−03 |
| 49A2 | 7.67E−10 | 3.73E+05 | 2.86E−04 | 1.87E−09 | 7.73E+05 | 1.44E−03 |
| 50A12 | 4.85E−09 | 5.19E+05 | 2.52E−03 | 6.42E−09 | 6.87E+05 | 4.41E−03 |
| 57C10 | 8.24E−10 | 3.04E+05 | 2.51E−04 | 1.28E−09 | 1.87E+05 | 2.40E−04 |
| 57F5 | <2.81E−10* | 6.27E+05 | <1.76E−4* | <2.9E−10* | 6.07E+05 | <1.76E−4* |
| 61B12 | <5.57E−10* | 3.16E+05 | <1.76E−4* | 1.27E−09 | 3.91E+05 | 4.95E−04 |
| 61G5 | <2.85E−10* | 6.18E+05 | <1.76E−4* | 1.31E−09 | 3.64E+05 | 4.76E−04 |
| 63F8 | <2.20E−10* | 7.99E+05 | <1.76E−4* | 8.56E−10 | 7.52E+05 | 6.44E−04 |
| 64D7 | <2.50E−10* | 7.05E+05 | <1.76E−4* | 6.80E−10 | 5.19E+05 | 3.53E−04 |
| 66B8 | 7.98E−09 | 1.71E+05 | 1.36E−03 | 1.64E−09 | 1.54E+05 | 2.53E−04 |

*A < symbol designates that less than 10% of the TREM1 dissociated during the allotted 10-minute dissociation time, indicating that the k_{d} is <1.76E−4 s⁻¹. The < K_{D} (M) is calculated based on k_{d} <1.76E−4 s⁻¹.

[0435] Antibodies were selected based on binding to human or cyno TREM-1, lack of binding to TREM2, and their ability to block PGLYRP1 binding to TREM-1. 14 antibodies were selected for further study as set out in Table 6.

TABLE 6
Anti-TREM-1 antibody clones

| ID | Vh | Vlight | HCDR3 | Human KD | Cyno KD |
|---|---|---|---|---|---|
| 66B8 | VH1\|1-02/D6\|6- | VK1\|L5/JK5 | AGYSTSWKDWFDP | 7.98E−09 | 1.64E−09 |
| | 6\|RF1/JH5 | | | | |
| 44A5 | VH3\|3-23/D6\|6- | VK3\|L2/JK4 | AYYSNYLFDY | 4.04E−10 | 2.02E−09 |
| 46H7 | 6\|RF1/JH4 | VK3\|L2/JK1 | EFSSNSLFDY | 4.57E−10 | 9.93E−10 |
| 57F5 | VH3\|3-23/D1\|1- | VK1\|O12/JK4 | EGGSNRYFHH | <2.81E−10 | <2.9E−10 |
| 30H2 | 26\|RF3/JH1 | VK3\|L2/JK1 | VAGSNFFFDH | 8.98E−10 | 5.70E−09 |
| 3E12 | VH1\|1-02/D1\|1- | VL3\|3r/JL2 | DQRKTTVTPFEY | 5.70E−10 | 1.80E−09 |
| | 1\|RF1/JH4 | | | | |
| 61B12 | VH1\|1-08/D6\|6- | VK1\|O18/JK4 | GGISSSWHWAFDI | <5.57E−10 | 1.27E−09 |
| | 6\|RF1/JH3 | | | | |
| 63F8 | VH1\|1-08/D6\|6- | VK1\|O18/JK4 | GGRTSIWSFVFDY | <2.20E−10 | 8.56E−10 |
| | 13\|RF1/JH4 | | | | |
| 57C10 | VH1\|1-08/D6\|6- | VK1\|O18/JK4 | GGYTSAWRWYFDL | 8.24E−10 | 1.28E−09 |
| | 13\|RF1/JH2 | | | | |
| 34D1 | VH1\|1-08/D3\|3- | VK1\|O18/JK5 | GGYTSSWRWYFDL | 8.81E−10 | 4.97E−09 |
| | 22\|RF2/JH2 | | | | |
| 49A2 | VH3\|3-07/D1\|1- | VK3\|L2/JK4 | GGWRFES | 7.67E−10 | 1.87E−09 |
| | 1\|RF1/JH1 | | | | |
| 61G5 | VH1\|1-08/D7\|7- | VK1\|O18/JK5 | LIGYSSAWKWSFQH | <2.85E−10 | 1.31E−09 |
| | 27\|RF1/JH1 | | | | |
| 64D7 | VH1\|1-08/D6\|6- | VK1\|O18/JK4 | RRAVYRSSWEWYFDL | <2.50E−10 | 6.80E−10 |
| | 19\|RF2/JH2 | | | | |
| 50A12 | VH3\|3-07/D4\|4- | VK1\|L5/JK1 | DYGDSFDY | 4.85E−09 | 6.42E−09 |
| | 17\|RF2/JH4 | | | | |

TABLE 7
Anti TREM-1 Antibody Full Sequences

| | LIGHT | HEAVY | LIGHT | HEAVY |
|---|---|---|---|---|
| | CHAIN | CHAIN | CHAIN | CHAIN |
| | NT SEQ | NT SEQ | AA SEQ | AA SEQ |
| CLONE | ID NO: | ID NO: | ID NO: | ID NO: |
| 66B8 | 3 | 4 | 5 | 6 |
| 64D7 | 23 | 24 | 25 | 26 |
| 63F8 | 43 | 44 | 45 | 46 |
| 61G5 | 63 | 64 | 65 | 66 |
| 61B12 | 83 | 84 | 85 | 86 |
| 57F5 | 103 | 104 | 105 | 106 |
| 57C10 | 123 | 124 | 125 | 126 |
| 50A12 | 143 | 144 | 145 | 146 |
| 49A2 | 163 | 164 | 165 | 166 |
| 46H7 | 183 | 184 | 185 | 186 |
| 44A5 | 203 | 204 | 205 | 206 |
| 30H2 | 223 | 224 | 225 | 226 |
| 34D1 | 243 | 244 | 245 | 246 |
| 3E12 | 263 | 264 | 265 | 266 |
| 1B12 | 537 | 538 | 539 | 540 |

TABLE 8
TREM-1 Antibody Variable Region Sequences

| | VL DNA | VH DNA | VL AA | VH AA |
|---|---|---|---|---|
| CLONE | SEQ ID NO: | SEQ ID NO: | SEQ ID NO: | SEQ ID NO: |
| 66B8 | 19 | 20 | 21 | 22 |
| 64D7 | 39 | 40 | 41 | 42 |
| 63F8 | 59 | 60 | 61 | 62 |
| 61G5 | 79 | 80 | 81 | 82 |
| 61B12 | 99 | 100 | 101 | 102 |
| 57F5 | 119 | 120 | 121 | 122 |
| 57C10 | 139 | 140 | 141 | 142 |
| 50A12 | 159 | 160 | 161 | 162 |
| 49A2 | 179 | 180 | 181 | 182 |
| 46H7 | 199 | 200 | 201 | 202 |
| 44A5 | 219 | 220 | 221 | 222 |
| 30H2 | 239 | 240 | 241 | 242 |
| 34D1 | 259 | 260 | 261 | 262 |
| 3E12 | 279 | 280 | 281 | 282 |

TABLE 9
TREM-1 Antibody Clone Light Chain CDR Sequences

| | LCDR1 NT | LCDR2 NT | LCDR3 NT | LCDR1 AA | LCDR 2 AA | LCDR3 AA |
|---|---|---|---|---|---|---|
| CLONE | SEQ ID NO: | SEQ ID NO: | SEQ ID NO: | SEQ ID NO: | SEQ ID NO: | SEQ ID NO: |
| 66B8 | 7 | 8 | 9 | 10 | 11 | 12 |
| 64D7 | 27 | 28 | 29 | 30 | 31 | 32 |
| 63F8 | 47 | 48 | 49 | 50 | 51 | 52 |
| 61G5 | 67 | 68 | 69 | 70 | 71 | 72 |
| 61B12 | 87 | 88 | 89 | 90 | 91 | 92 |
| 57F5 | 107 | 108 | 109 | 110 | 111 | 112 |
| 57C10 | 127 | 128 | 129 | 130 | 131 | 132 |
| 50A12 | 147 | 148 | 149 | 150 | 151 | 152 |
| 49A2 | 167 | 168 | 169 | 170 | 171 | 172 |
| 46H7 | 187 | 188 | 189 | 190 | 191 | 192 |
| 44A5 | 207 | 208 | 209 | 210 | 211 | 212 |
| 30H2 | 227 | 228 | 229 | 230 | 231 | 232 |
| 34D1 | 247 | 248 | 249 | 250 | 251 | 252 |
| 3E12 | 267 | 268 | 269 | 270 | 271 | 272 |
| 1B12 | 541 | 542 | 543 | 544 | 545 | 546 |

TABLE 10
TREM-1 Antibody Clone Heavy Chain CDR Sequences

| | HCDR1 NT | HCDR2 NT | HCDR3 NT | HCDR1 AA | HCDR 2 AA | HCDR3 AA |
|---|---|---|---|---|---|---|
| CLONE | SEQ ID NO: | SEQ ID NO: | SEQ ID NO: | SEQ ID NO: | SEQ ID NO: | SEQ ID NO: |
| 66B8 | 13 | 14 | 15 | 16 | 17 | 18 |
| 64D7 | 33 | 34 | 35 | 36 | 37 | 38 |
| 63F8 | 53 | 54 | 55 | 56 | 57 | 58 |
| 61G5 | 73 | 74 | 75 | 76 | 77 | 78 |
| 61B12 | 93 | 94 | 95 | 96 | 97 | 98 |
| 57F5 | 113 | 114 | 115 | 116 | 117 | 118 |
| 57C10 | 133 | 134 | 135 | 136 | 137 | 138 |
| 50A12 | 153 | 154 | 155 | 156 | 157 | 158 |
| 49A2 | 173 | 174 | 175 | 176 | 177 | 178 |
| 46H7 | 193 | 194 | 195 | 196 | 197 | 198 |
| 44A5 | 213 | 214 | 215 | 216 | 217 | 218 |
| 30H2 | 233 | 234 | 235 | 236 | 237 | 238 |
| 34D1 | 253 | 254 | 255 | 256 | 257 | 258 |
| 3E12 | 273 | 274 | 275 | 276 | 277 | 278 |
| 1B12 | 547 | 548 | 549 | 550 | 551 | 552 |

### Example 2-Reformatting of Anti-TREM-1 Antibodies

[0436] Lead anti-TREM-1 antibodies from the XenoMouse® campaign were converted to an antibody format of the IgG1z subtype by fusing the VL domain of kappa light chains to CK domain, the VL domain of lambda light chains to CL domain, and VH domains to the CH1-CH2-CH3(221-447) sequence. The CH2 domain of this antibody isotype has been engineered for reduced effector function by incorporating an N297G mutation and for improved thermostability through an engineered disulfide bond (1R292C, V302C); this antibody isotype is designated IgG1z SEFL2. The lead anti-TREM-1 antibodies were additionally engineered to remove “hotspots,” or residues that were computationally predicted or empirically determined to negatively impact the molecule's expression, purification, thermal stability, colloidal stability, long-term storage stability, in vivo pharmacokinetics, and/or immunogenicity. A variety of amino acid mutations at these hotspots were designed based on conservation, co-variation, chemical similarity, predictions from structural modeling, and prior knowledge from other antibody engineering campaigns. A small panel of rationally designed engineered antibodies were designed that included both single mutations and combinations of mutations.

[0437] Recombinant expression constructs for the rationally designed panel of hotspot engineered variants were produced using Golden Gate cloning to assemble 1) synthetic DNA fragments comprising the antibody variable domains, 2) previously cloned “parts vectors” containing the necessary constant domains (i.e., CK or CL, CH1-CH2-CH3(118-447) (R292C, N297G, V302C)), and 3) a mammalian expression vector backbone. Heavy chains (HCs) were assembled into a vector backbone with a puromycin selection cassette and light chains (LCs) were assembled into a vector backbone with a hygromycin selection cassette. The HC and LC expression vectors were co-transfected in a 1:1 ratio in CHO-K1 cells using Lipofectamine LTX (Gibco), and stable pools were generated by passaging every 2-3 days in the presence of 10 ug/mL puromycin and 500 ug/mL hygromycin until cell viability was >90% (Vi-CELL BLU, Beckman Coulter). Stable pools were seeded in production media at 2e6 viable cells per mL of culture and incubated at 36° C. in 5% CO₂ for 6 days. Cell supernatant was harvested by centrifugation and antibodies were purified by magnetic bead affinity chromatography using AmMag™ Protein A Magnetic Beads (GenScript) or MAG SEPHAROSE™ PrismA (Cytiva). The identity of each variant was confirmed by intact mass spectrometry. For each variant, the expression titer in conditioned medium was measured by ForteBio OCTET® (Pall Life Sciences) using Protein A sensors. The percent of high molecular weight (% HMW) material present after Protein A affinity chromatography was measured by analytical size exclusion chromatography, and the % target protein purity was measured by non-reduced microcapillary electrophoresis (MCE NR) using a LabChip® GXII (Perkin Elmer). Data for the variants prepared by this process appear in Table 11.

TABLE 11
Panel of rationally designed hotspot engineered TREM1 antibodies

| | Heavy chain | Light chain | % HMW | % target |
|---|---|---|---|---|
| Antibody ID | SEQ ID NO. | SEQ ID NO: | material | purity |
| TREM1_30H2.001_huIgGz SEFL2 | 283 | 715 | 1 | 100 |
| TREM1_34D1.001_huIgGz SEFL2 | 285 | 716 | 3 | 99 |
| TREM1_3E12.001_huIgGz SEFL2 | 287 | 2545717 | 4 | 95 |
| TREM1_44A5.001_huIgGz SEFL2 | 289 | 2546718 | 1 | 100 |
| TREM1_46H7_huIgGz SEFL2 | 291 | 2547719 | 4 | 98 |
| TREM1_49A2.001_huIgGz SEFL2 | 293 | 2548720 | 3 | 97 |
| TREM1_50A12_huIgGz SEFL2 | 295 | 2549721 | 2 | 99 |
| TREM1_57C10.001_huIgGz SEFL2 | 297 | 2550722 | 1 | 99 |
| TREM1_57F5.001_huIgGz SEFL2 | 299 | 2551723 | 1 | 100 |
| TREM1_61B12.001_huIgGz SEFL2 | 301 | 2552724 | 2 | 99 |
| TREM1_61G5.001_huIgGz SEFL2 | 303 | 2553725 | 1 | 100 |
| TREM1_63F8.001_huIgGz SEFL2 | 305 | 2554726 | 1 | 99 |
| TREM1_64D7.001_huIgGz SEFL2 | 307 | 2555727 | 0 | 99 |
| TREM1_66B8_huIgGz SEFL2 | 309 | 2556728 | 1 | 99 |
| TREM1_34D1.001_huIgGz SEFL2 | 311 | 2557729 | 3 | 99 |
| TREM1_44A5.001_huIgGz SEFL2 | 313 | 2558730 | 3 | 98 |
| TREM1_50A12_huIgGz SEFL2 | 315 | 2559731 | 0 | 98 |
| TREM1_57C10.001_huIgGz SEFL2 | 317 | 2560732 | ND | ND |
| TREM1_61G5.001_huIgGz SEFL2 | 319 | 2561733 | 9 | 97 |
| TREM1_64D7.001_huIgGz SEFL2 | 321 | 2562734 | 0 | 100 |
| TREM1_66B8_huIgGz SEFL2 | 323 | 2563735 | ND | ND |
| TREM1_57C10(VH: N83D_N87S, VL: S77R_C83S_F105Y_E148K) | 325 | 256473 | ND | ND |
| TREM1_57C10(VH: N83D, VL: S77R_C83S_F105Y_E148K) | 327 | 737 | ND | ND |
| TREM1_66B8(VH: S81T_W115Y, VL: F7S) | 329 | 738 | 2 | 99 |
| TREM1_66B8(VH: S81T_W115H, VL: F7S) | 331 | 739 | 0 | 93 |
| TREM1_66B8(VH: S81T_W115F, VL: F7S) | 333 | 740 | 1 | 97 |
| TREM1_66B8(VH: S81T, VL: F7S_Q48P) | 335 | 741 | ND | ND |
| TREM1_66B8(VH: S81T, VL: F7S) | 337 | 742 | ND | ND |
| TREM1_19337(VH: N83D, VL: E15V_Y89F) | 339 | 743 | 1 | 100 |
| TREM1_19337(VH: N83D, VL: E15V_E46Q) | 341 | 744 | 1 | 98 |
| TREM1_19337(VH: N83D, VL: E15V) | 343 | 745 | 1 | 99 |
| TREM1_61G5(VH: N83D_W116Y, VL: Q55L_I101F) | 345 | 746 | 1 | 97 |
| TREM1_61G5(VH: N83D_W116Y, VL: Q55L) | 347 | 747 | 2 | 98 |
| TREM1_61G5(VH: N83D_W116F, VL: Q55L_I101F) | 349 | 748 | 2 | 97 |
| TREM1_61G5(VH: N83D_W116F, VL: Q55L) | 351 | 749 | ND | ND |
| TREM1_61G5(VH: N83D_I86T_W116Y, VL: Q55L_I101F) | 353 | 750 | 1 | 98 |
| TREM1_61G5(VH: N83D_I86T, VL: Q55L_I101F) | 355 | 751 | 1 | 100 |
| TREM1_61G5(VH: N83D, VL: Q55L_I101F) | 357 | 752 | 2 | 99 |
| TREM1_61G5(VH: N83D, VL: Q55L) | 359 | 753 | 2 | 99 |
| TREM1_50A12(VH: F90Y_S135V), | 361 | 754 | 0 | 98 |
| TREM1_50A12(VH: F90Y_S135A), | 363 | 755 | 0 | 84 |
| TREM1_50A12(VH: F90Y_D112E), | 365 | 756 | 0 | 99 |
| TREM1_24B1(VH: T48P_N83D, VL: N20T_N53K_A88D_I101F) | 367 | 757 | 0 | 97 |
| TREM1_24B1(VH: S68A_N83D, VL: N20T) | 369 | 758 | 0 | 99 |
| TREM1_24B1(VH: S65A_S68A_N83D, VL: N20T_N53K_A88D_I101F) | 371 | 759 | 1 | 97 |
| TREM1_24B1(VH: S65A_N83D, VL: N20T) | 373 | 760 | 0 | 100 |
| TREM1_24B1(VH: N83D_W134Y, VL: N20T_N53K_A88D_I101F) | 375 | 761 | 0 | 99 |
| TREM1_24B1(VH: N83D_W134H, VL: N20T_N53K_A88D_I101F) | 377 | 762 | 1 | 98 |
| TREM1_24B1(VH: N83D_W134F, VL: N20T_N53K_A88D_I101F) | 379 | 763 | 0 | 97 |
| TREM1_24B1(VH: N83D, VL: N20T_N53K_A88D_F91L_I101F) | 381 | 764 | 0 | 97 |
| TREM1_24B1(VH: N67Q_N83D, VL: N20T) | 383 | 765 | 0 | 93 |
| TREM1_24B1(VH: N61Q_N83D, VL: N20T) | 385 | 766 | 0 | 98 |
| TREM1_24B1(VH: N61Q_N67Q_N83D, VL: N20T_N53K_A88D_I101F) | 387 | 767 | 1 | 98 |
| TREM1_3E12(VH: W77R_T97R, VL: N40Q_C42S_L46Q_I53V_I90T) | 389 | 768 | ND | ND |
| TREM1_3E12(VH: W77R_T97R, VL: N40Q_C42S_I53V_I90T) | 391 | 769 | ND | ND |
| TREM1_3E12(VH: W77R_T97R, VL: C42G_L46Q_I53V_I90T) | 393 | 770 | ND | ND |
| TREM1_3E12(VH: W77R_T97R, VL: C42A_L46Q_I53V_I90T) | 395 | 771 | ND | ND |
| TREM1_3E12(VH: W77R, VL: N40Q_C42S_I53V_I90T) | 397 | 772 | ND | ND |
| TREM1_44A5(VLI10T_V74I_G81S_S98P_C109F_D146E_L147I) | 399 | 773 | 4 | 99 |
| TREM1_44A5(VLI10T_V74I_G81S_C108F_W111Y_D146E_L147I) | 401 | 774 | 3 | 99 |
| TREM1_44A5(VLI10T_V74I_G81S_C108F_W111F_D146E_L147I) | 403 | 775 | 2 | 99 |
| TREM1_44A5(VLI10T_V74I_G81S_C108F_W111H_D146E_L147I) | 405 | 776 | 3 | 99 |
| TREM1_44A5(VLI10T_V74I_G81S_S98P_C108F_W111Y_D146E_L147I) | 407 | 777 | 5 | 98 |

[0438] A subset of three anti-TREM-1 lead antibodies from the XENOMOUSE® campaign (30H2 (19330), 49A2 (19333), and 46H7 (19332)) were also engineered through yeast display for improved manufacturability with retained binding to TREM-1. For each antibody, libraries were generated in which every possible adjacent pair of residues in all six CDRs were simultaneously mutated to all possible amino acids through use of degenerate NNK codons. The libraries were displayed on the surface of yeast derivative of BJ5464, wherein the Fd domain was fused to the N-terminus of alpha-agglutinin and the LC was not fused to the yeast surface. Efficiency of display was measured by binding of ALEXA FLUOR® 647 conjugated anti-Fab antibody. Libraries were sorted using fluorescence activated cell sorting (FACS) for high binding to biotin conjugated recombinant TREM-1 ECD) using streptavidin PE as fluorescence secondary. The variable domains present in the sorted binding/display double positive pools and display positive pools were amplified with primers specific to the framework 1 (FW1) and FW4 domains of the HC and LC and submitted to NGS analysis on an Illumina MiSeq for a 2×300 bp run. Mutations were selected after processing the data through a common frequency analysis where the ratio of positive binding amino acid frequencies are divided by positive display amino acid frequencies which is then normalized to the parental sequence ratio. The sequences for which the enrichment values were greater than or equal to the parental sequence were considered beneficial or tolerated diversity and were used for additional rational antibody engineering post affinity maturation.

[0439] Top display engineered variable domains were converted to the IgG1z SEFL2 isotype and cloned using Golden Gate cloning to assemble 1) synthetic DNA fragments comprising the antibody variable domains, 2) previously cloned “parts vectors” containing the necessary constant domains (i.e., CK or CL, CH1-CH2-CH3(118-447) (R292C, N297G, V302C)), and 3) a mammalian expression vector backbone. Heavy chains (HCs) were assembled into a vector backbone with a puromycin selection cassette and light chains (LCs) were assembled into a vector backbone with a hygromycin selection cassette. The HG and LC expression vectors were co-transfected in a 1:1 ratio in CHO-K1 cells using Lipofectamine LTX (Gibco) and stable pools were generated by passaging every 2-3 days in the presence of 10 ug/mL puromycin and 500 ug/mL hygromycin until cell viability was >90% (Vi-CELL BLU, Beckman Coulter). Stable pools were seeded in production media at 2e6 viable cells per mL of culture and incubated at 36° C. in 5% CO₂ for 6 days. Antibodies were purified by magnetic bead affinity chromatography using AMMAG™ Protein A Magnetic Beads (GenScript). The identity of each molecule was confirmed by intact mass spectrometry. The percent of high molecular weight (% HMW) material present after Protein A affinity chromatography was measured by analytical size exclusion chromatography, and the % target protein purity was measured by non-reduced microcapillary electrophoresis (MOE NR) using a LabChip® GXII (Perkin Elmer). Data for the variants prepared by yeast display hot-spot engineering appear in Table 12.

TABLE 12
Yeast display hot-spot engineered variant TREM1 antibodies

| | HC SEQ | LC SEQ | % | % target |
|---|---|---|---|---|
| Antibody ID | ID NO. | ID NO. | HMW | purity |
| TREM1_30H2(VH: E17G_T24A, VL: S39A_L141Q_Q144K) | 411 | 587 | 21 | 99 |
| TREM1_30H2(VH: E17G_T24A, VL: S39I_L141Q_Q144K) | 413 | 589 | 22 | 85 |
| TREM1_30H2(VH: E17G_T24A, VL: S39H_L141Q_Q144K) | 415 | 591 | 21 | 99 |
| TREM1_30H2(VH: E17G_T24A, VL: S39V_L141Q_Q144K) | 417 | 593 | 20 | 87 |
| TREM1_30H2(VH: E17G_T24A, VL: M111I_L141Q_Q144K) | 419 | 595 | 38 | 99 |
| TREM1_30H2(VH: E17G_T24A, VL: M111L_L141Q_Q144K) | 421 | 597 | 29 | 99 |
| TREM1_30H2(VH: E17G_T24A, VL: W111F_L141Q_Q144K) | 423 | 599 | 15 | 99 |
| TREM1_30H2(VH: E17G_T24A, VL: W137Y_L141Q_Q144K) | 425 | 601 | 17 | 99 |
| TREM1_30H2(VH: E17G_T24A, VL: W137H_L141Q_Q144K) | 427 | 603 | 17 | 99 |
| TREM1_30H2(VH: E17G_T24A, VL: W137N_L141Q_Q144K) | 429 | 605 | 17 | 99 |
| TREM1_30H2(VH: V4L_E17G_T24A_A99E, VL: L141Q_Q144K) | 431 | 607 | 3 | 99 |
| TREM1_30H2(VH: V4L_E17G_T24A_A99E, VL: S39A_M111L_L141Q_Q144K) | 433 | 609 | 15 | 95 |
| TREM1_30H2(VH: V4L_E17G_T24A_A99E, VL: S39A_M111L_W137H_L141Q_Q144K) | 435 | 611 | 3 | 98 |
| TREM1_30H2(VH: V4L_E17G_T24A_A99E, VL: S39A_M111L_W137N_L141Q_Q144K) | 437 | 613 | 3 | 97 |
| TREM1_30H2(VH: V4L_E17G_T24A_A99E, VL: S39A_M110L_W111F_L141Q_Q144K) | 439 | 615 | 3 | 97 |
| TREM1_30H2(VH: V4L_E17G_T24A_A99E, VL: S39A_M110L_W111F_W137N_L141Q_Q144K) | 441 | 617 | 2 | 96 |
| TREM1_30H2(VH: V4L_E17G_T24A_A99E, VL: S39A_M110L_W111F_W137H_L141Q_Q144K) | 443 | 619 | 38 | 98 |
| TREM1_30H2(VH: V4L_E17G_T24A_A99E, VL: S39H_M111L_L141Q_Q144K) | 445 | 621 | 12 | 99 |
| TREM1_30H2(VH: V4L_E17G_T24A_A99E, VL: S39H_M111L_W137N_L141Q_Q144K) | 447 | 623 | 3 | 98 |
| TREM1_30H2(VH: V4L_E17G_T24A_A99E, VL: S39H_M111L_W137H_L141Q_Q144K) | 449 | 625 | 2 | 98 |
| TREM1_30H2(VH: V4L_E17G_T24A_A99E, VL: S39H_M110L_W111F_L141Q_Q144K) | 451 | 627 | 3 | 98 |
| TREM1_30H2(VH: V4L_E17G_T24A_A99E, VL: $39H_M110L_W111F_W137N_L141Q_Q144K) | 453 | 629 | 3 | 98 |
| TREM1_30H2(VH: V4L_E17G_T24A_A99E, VL: S39H_M110L_W111F_W137H_L141Q_Q144K) | 454 | 631 | 4 | 98 |
| TREM1_46H7(VL: R50Q) | 457 | 633 | 4 | 99 |
| TREM1_46H7(VL: S39A_R50Q) | 459 | 635 | 4 | 99 |
| TREM1_46H7(VL: S391_R50Q) | 461 | 637 | 4 | 98 |
| TREM1_46H7(VL: S39H_R50Q) | 463 | 639 | 3 | 99 |
| TREM1_46H7(VL: S39V_R50Q) | 465 | 641 | 4 | 99 |
| TREM1_46H7(VL: R50Q_W111F) | 467 | 643 | 4 | 99 |
| TREM1_46H7(VL: R50Q_W137Y) | 469 | 645 | 4 | 99 |
| TREM1_46H7(VL: R50Q_W137H) | 471 | 647 | 5 | 99 |
| TREM1_46H7(VL: R50Q_W137N) | 473 | 649 | 9 | 99 |
| TREM1_46H7(VH: M12L, VL: R50Q) | 475 | 651 | 4 | 99 |
| TREM1_46H7(VH: M12L, VL: S39A_R50Q) | 477 | 653 | 3 | 99 |
| TREM1_46H7(VH: M12L, VL: S39A_R50Q_W111F) | 479 | 655 | 4 | 99 |
| TREM1_46H7(VH: M12L, VL: S39A_R50Q_W137Y) | 481 | 657 | 0 | 0 |
| TREM1_46H7(VH: M12L, VL: S39A_R50Q_W137H) | 483 | 659 | 4 | 99 |
| TREM1_46H7(VH: M12L, VL: S39A_R50Q_W111F_W137Y) | 485 | 661 | 4 | 99 |
| TREM1_46H7(VH: M12L, VL: S39A_R50Q_W111F_W137H) | 487 | 663 | 4 | 99 |
| TREM1_46H7(VH: M12L, VL: S39H_R50Q) | 489 | 665 | 3 | 99 |
| TREM1_46H7(VH: M12L, VL: S39H_R50Q_W111F) | 491 | 667 | 3 | 99 |
| TREM1_46H7(VH: M12L, VL: S39H_R50Q_W137N) | 493 | 669 | 9 | 99 |
| TREM1_46H7(VH: M12L, VL: S39H_R50Q_W137Y) | 495 | 671 | 3 | 99 |
| TREM1_46H7(VH: M12L, VL: S39H_R50Q_W111F_W137N) | 497 | 673 | 6 | 99 |
| TREM1_46H7(VH: M12L, VL: S39H_R50Q_W111F_W137Y) | 499 | 675 | 3 | 99 |
| TREM1_49A2(VH: M55V_A143T, VL: V78F_L139F) | 501 | 677 | 16 | 99 |
| TREM1_49A2(VH: M55V_A143T, VL: S48P_V78F_L139F) | 503 | 679 | 16 | 99 |
| TREM1_49A2(VH: M55V_A143T, VL: V78F_F91L_L139F) | 505 | 681 | 14 | 99 |
| TREM1_49A2(VH: M55V_M58I_A143T, VL: V78F_L139F) | 507 | 683 | 21 | 98 |
| TREM1_49A2(VH: M55V_A143T, VL: V78F_W135F_L139F) | 509 | 685 | 21 | 99 |
| TREM1_49A2(VH: M55V_D61H_A143T, VL: V78F_L139F) | 511 | 687 | 4 | 99 |
| TREM1_49A2(VH: M55V_G65A_A143T, VL: V78F_L139F) | 513 | 689 | 10 | 99 |
| TREM1_49A2(VH: M55V_G65L_A143T, VL: V78F_L139F) | 515 | 691 | 6 | 99 |
| TREM1_49A2(VH: M55V_D72E_A143T, VL: V78F_L139F) | 517 | 693 | 15 | 99 |
| TREM1_49A2(VH: M55V_M58I_G65A_S73A_A143T, VL: V78F_F91L_W135F_L139F) | 519 | 695 | 16 | 99 |
| TREM1_49A2(VH: M55V_S73A_A143T, VL: V78F_L139F) | 521 | 697 | 22 | 98 |
| TREM1_49A2(VH: M55V_M58I_G65A_S73A_A143T, VL: S48P_V78F_F91L_L139F) | 523 | 699 | 16 | 99 |
| TREM1_49A2(VH: M55V_M58I_G65A_S73A_A143T, VL: V78F_F91L_L139F) | 525 | 701 | 22 | 99 |
| TREM1_49A2(VH: M55V_M58I_G65A_D72E_A143T, VL: S48P_V78F_F91L_L139F) | 527 | 703 | 15 | 99 |
| TREM1_49A2(VH: M55V_M58I_G65A_D72E_A143T, VL: V78F_F91L_L139F) | 529 | 705 | 16 | 99 |
| TREM1_49A2(VH: M55V_M58I_G65A_D72E_A143T, VL: S48P_V78F_F91L_W135F_L139F) | 531 | 707 | 21 | 99 |
| TREM1_49A2(VH: M55V_M58I_G65A_D72E_A143T, VL: V78F_F91L_W135F_L139F) | 533 | 709 | 21 | 98 |
| TREM1_49A2(VL: L139F) | 535 | 711 | 12 | 98 |

[0440] Comparison of bivalent and monovalent anti-TREM-1 mAbs in HEK293 cells expressing TREM-1/DAP12 was carried out by analysis of the phosphorylation levels of Syk kinase in cells using a p-Syk ALPHALISA® (Perkin-Elmer). Briefly, HEK293 cells stably expressing human TREM1 and DAP12 were cultured in DMEM/F12 Ham medium (Corning) supplemented with 10% dialyzed FBS (Gibco), 2 mM GlutaMAX (Gibco), 2 mM L-glutamine (Sigma), 1% penicillin/streptomycin (Gibco) and 0.1 mg/mL zeocin (Gibco) at 37° C./5% CO₂. One day prior to experiment, the cells were detached using Trypsin-EDTA and centrifuged at 400×g for 5 minutes. The cell pellet was resuspended in complete medium before a second centrifugation at 400×g for 5 minutes. After centrifugation the cells were resuspended in complete medium at a concentration of 1×10⁶ cells/mL and seeded to CELLBIND® 96-well clear flat bottom polystyrene plates (Corning) at a final volume of 100 μL/well or 50,000 cells/well. The seeded plates were incubated at 37° C./5% CO₂ overnight for 18 to 24 hours. On the day of experiment, 70 μL of medium was removed from each well. TREM1 antibodies were diluted to 3 times the highest final concentration in a 4-fold serial dilution in assay medium (DMEM/F12 HAM medium supplemented with 10% heat inactivated FBS). The crosslinking reagent Protein G (Sigma) was prepared at 3 times the final concentration using assay medium. The titrated TREM1 antibodies were mixed 1 to 1 with either Protein G or assay medium and 60 μL of each TREM1 antibodies+/− crosslinking reagent was added to each well containing cells. These plates were incubated at room temperature for 1 hour before all medium was removed from the wells and the cells were then lysed using 25 μL/well of lysis buffer (M-Per Mammalian Protein Extraction Reagent and 1× Halt Protease/Phosphatases Inhibitor). The cells were incubated with lysis buffer on ice for 1 hour before 5 μL of cell lysate was transferred to each well of a 384-well white plate (PerkinElmer) containing AlphaLISA® acceptor cocktail (1 nM anti-pSyk, rabbit IgG (anti-phosphoSyk(Tyr525/526) (Clone C87C1)) (Cell Signaling Technology), 1 nM biotin-anti-Syk, mouse IgG (Clone 4D10) (BD Biosciences), 10 μg/mL anti-rabbit-IgG AlphaLISA® acceptor beads (PerkinElmer), and 1× Halt Inhibitor, in 1× AlphaLISA8 Immunoassay Buffer (PerkinElmer)). The plates were further incubated on ice for 2 hours before 5 μL of AlphaLISA® donor cocktail (streptavidin-alpha-donor beads (PerkinElmer) in 1× Immunoassay Buffer) was added at 40 μg/mL final concentration and incubated at room temperature in the dark for 1 hour. After incubation, phospho-Syk (pSyk) signal was detected via FRET (fluorescence resonance energy transfer) using ENVISION® plate reader (PerkinElmer). Results were calculated by ratio of sample pSyk signal/basal pSyk signal with potency and max signal being compared between the variations of each antibody. Bivalent anti-TREM-1 mAbs treatment alone induces weak signals in TREM-1/DAP12-expressing cells. No pSyk signal was observed with monovalent anti-TREM-1 mAbs, and cross-linking bivalent and monovalent anti-TREM-1 mAbs with protein G result in pSyk induction.

[0441] Clading and Alignment of Antibody Sequences: The VH and VL domains of input antibody sequences were extracted and aligned to a structure-based IgG numbering system based on Honegger and Pluckthun (J Mol Biol. 309(3):657-70, 2001). A distance matrix was generated from the composite multiple sequence alignment using an uncorrected model, in which the distance between two sequences is the fraction of mismatches in both the VH and VL domains. Finally, the distance matrix was used to construct a tree via the UPGMA (unweighted pair group method with arithmetic mean) method (Sokal and Michener, University of Kansas Science Bulletin. 38: 1409-1438, 1958), and related sequences were grouped based on a branch traversal limit of 0.2. Alignments were refined manually based on chemical similarity of amino acids to generate consensus CDR sequences for each cladded group resulting in the sequences shown in Table 13.

TABLE 13
Consensus Sequences of TREM-1 Antigen Binding Proteins

| Alignment | | | | | | |
|---|---|---|---|---|---|---|
| Group | LCDR1 | LCDR2 | LCDR3 | HCDR1 | HCDR2 | HCDR3 |
| Group I | X₁ASQSX₂X₃ | GAX₁X₂RAT | QX₁X₂X₃X₄X₅ | X₁X₂X₃MX₄ | X₁X₂X₃X₄X₅X₆ | X₁X₂X₃X₄X₅X₆ |
| | X₄NLA | (SEQ ID | X₆PX₇T | (SEQ ID | X₇X₈X₉YYX₁₀ | X₇X₈X₉YYX₁₀ |
| | (SEQ ID | NO: 554), | (SEQ ID | NO: 556) | X₁₁X₁₂VKG | (SEQ ID |
| | NO: 553) | | NO: 555) | | (SEQ ID | NO: 557) |
| | | | | | NO: 559) | |
| | RASQSVNS | GASTRAT | QQFKNWP | AYAMS | TSGSGSTT | VAGSNFLF |
| | NLA (SEQ | (SEQ ID | PT (SEQ ID | (SEQ ID | YYADSVKG | DY (SEQ ID |
| | ID NO: 566) | NO: 573); | NO: 576); | NO: 581) | (SEQ ID | NO: 842). |
| | QASQDIHL | | | | NO: 584) | |
| | N (SEQ ID | | | | | |
| | NO: 569) | | | | | |
| Group II | RASQGIRK | AASRLQS | LQAHGFP | SYWMS | NIKQDGSE | DYGDSFDY |
| | WLA (SEQ | (SEQ ID | WT (SEQ ID | (SEQ ID | EYYVDSVK | (SEQ ID |
| | ID NO: 570) | NO: 575) | NO: 2224); | NO: 583) | G (SEQ ID | NO: 845) |
| | | | QFWPPWT | | NO: 586); | |
| | | | (SEQ ID | | TSGSGTYY | |
| | | | NO: 580) | | ADSVKG | |
| | | | | | (SEQ ID | |
| | | | | | NO: 841) | |
| Group III | QASX₁DIX₂ | X₁X₂X₃X₄LE | QX₁YX₃X₄X₅ | X₁YDIN | X₁X₂NPX₃X₄ | X₁X₂X₃X₄X₅X₆ |
| | X₃X₄LN | T (SEQ ID | PX₆T (SEQ | (SEQ ID | GX₅X₆GX₇X₈ | X₇X₈X₉X₁₀ |
| | (SEQ ID | NO: 560) | ID NO: 561) | NO: 563) | X₉X₁₀FX₁₁X₁₂ | X₁₁X₁₂FX₁₃X₁₄ |
| | NO: 558) | | | | (SEQ ID | (SEQ ID |
| | | | | | NO: 564) | NO: 565) |
| | QASQDIRK | DASNLET | QHYDNLPI | RYDIN | WMNPNSG | GGYTSSW |
| | HLN (SEQ | (SEQ ID | T (SEQ ID | (SEQ ID | NSSVQKFR | RWYFDL |
| | ID | NO: 574); | NO: 577); | NO: 582) | G (SEQ ID | (SEQ ID |
| | NO: 567); | | QQYDNLPL | | NO: 585) | NO: 843); |
| | | | T (SEQ ID | | | GGYTSSW |
| | | | NO: 579 | | | SRWYFDL |
| | | | | | | (SEQ ID |
| | | | | | | NO: 844) |

### Example 3—Efficacy of TREM-1 Antibodies Blocking Ligand Mediated Signaling in Human Peripheral Blood Mononuclear Cells (PBMC)

[0442] TREM-1 antibodies were tested for the ability to block signaling by inhibition of ligand binding to the TREM-1 receptor in human PBMCs. Frozen human PBMCs (IQ Biosciences) were thawed, washed and resuspended in complete cell culture media (RPMI/10% FBS/2 mM GlutaMax/1 mM Sodium Pyruvate/44 uM p-mercaptoethanol/1×DNAse I). PBMCs were seeded in 96 well cell culture plates at 100K/well and allowed to equilibrate for at least 30 minutes at 37° C. Thirteen anti-TREM-1 antibodies were diluted (3× serial dilution) in RPMI/10% FBS to generate final antibody concentrations ranging from 0.000017 nM to 3 nM. Antibody 57F5 was excluded from this analysis because in prior iterations of this assay that utilized higher concentrations of antibody, it failed to demonstrate any inhibition of signaling. Antibodies were pre-incubated with PBMCs for 30 minutes before addition of the TREM-1 ligand. Peptidoglycan recognition protein 1 (PGLYRP1) complexed with peptidoglycan (PGN) is one of several described TREM-1 ligands whose engagement with the TREM-1 receptor triggers the production of inflammatory cytokines (e.g. TNFα) and was used in these assays. To complex the proteins, human PGLYRP1 (R&D Systems) was combined with soluble PGN derived from E. coli (InvivoGen) in a 1.25:2 ratio and incubated for 45 minutes at 37° C. Complexed PGLYRP1/PGN was added to PBMC/antibody and incubated overnight at 37° C. The following day, cell media was collected and assayed for TNFα by Human TNFα Alphalisa proximity assay (Perkin Elmer). Light emission at 615 nm was measured on an Envision 2103 multilabel plate reader. IC50 values were calculated using GraphPad Prism (v8.4.3) and are presented for two separate assays in Table 14 below.

TABLE 14
TREM-1 Antibody Inhibition of Ligand Mediated Signaling
in Human PBMCs as Measured by TNFα Release

| | Ab IC50-Human PBMC | Ab IC50-Human PBMC |
|---|---|---|
| Antibody ID | (Trial 1) pM | (Trial 2) pM |
| 57C10 | 8.8 | 7.2 |
| 30H2 | 6.9 | nd |
| 61B12 | 8.0 | nd |
| 61G5 | 10.2 | 2.7 |
| 63F8 | 3.8 | 3.1 |
| 64D7 | 4.3 | 2.4 |
| 34D1 | 10.0 | 6.9 |
| 44A5 | 3.5 | 6.1 |
| 46H7 | 6.3 | 4.4 |
| 49A2 | 3.1 | 3.3 |
| 66B8 | 31.6 | nd |
| 50A12 | 3.3 | 3.6 |
| 57F5 | nd | nd |
| 3E12 | no inhibition | nd |

[0443] These results show that the TREM-1 antibodies bind human TREM-1, and importantly demonstrate inhibition of ligand-induced TREM-1 activation in human primary cells (PBMCs).

### Example 4—Efficacy of TREM-1 Antibodies Blocking Ligand Mediated Signaling in Cynomolgus Monkey Peripheral Blood Mononuclear Cells (PBMC)

[0444] TREM-1 antibodies were assayed for blocking signaling by the inhibition of ligand binding to the TREM-1 receptor in cynomolgus monkey PBMCs. Frozen cynomolgus monkey PBMCs (IQ Biosciences) were thawed, washed and resuspended in complete cell culture media (RPMI/10% FBS/2 mM GlutaMax/1 mM Sodium Pyruvate/44 uM p-mercaptoethanol/1×DNAse I). PBMCs were seeded in 96 well cell culture plates at 100K/well and allowed to equilibrate for at least 30 minutes at 37° C. Fourteen anti-TREM-1 antibodies were diluted (3× serial dilution) in RPMI/10% FBS to generate final antibody concentrations ranging from 0.00017 nM to 30 nM. Antibodies were pre-incubated with PBMCs for 30 minutes before addition of the TREM-1 ligand. Peptidoglycan recognition protein 1 (PGLYRP1) complexed with peptidoglycan (PGN) is one of several described TREM-1 ligands whose engagement with the TREM-1 receptor triggers the production of inflammatory cytokines (e.g. TNFα) and was used in this assay. To complex the proteins, cynomolgus monkey PGLYRP1 (Creative Biomart) was combined with soluble PGN derived from E. coli (InvivoGen) in a 1.25:2 ratio and incubated for 45 minutes at 37° C. Complexed PGLYRP1/PGN was added to PBMC/antibody and incubated overnight at 37° C. The following day, cell media was collected and assayed for TNFα by Cyno TNFα Alphalisa proximity assay (Perkin Elmer). Light emission at 615 nm was measured on an Envision 2103 multilabel plate reader. IC50 values were calculated using GraphPad Prism (v8.4.3) and are presented for two separate assays in Table 15.

TABLE 15
TREM-1 Antibody Inhibition of Ligand Mediated Signaling
in Cyno PBMCs as Measured by TNFα Release

| | Ab IC50-Cyno PBMC | Ab IC50-Cyno PBMC |
|---|---|---|
| Antibody ID | (Trial 1) pM | (Trial 2) pM |
| 57C10 | 153.8 | 28.4 |
| 30H2 | 3768 | no inhibition |
| 61B12 | 46.9 | 17.4 |
| 61G5 | no inhibition | 2338 |
| 63F8 | 22.6 | 16.1 |
| 64D7 | 6939 | 780.5 |
| 34D1 | 100.1 | 16.2 |
| 44A5 | 57.9 | 9.1 |
| 46H7 | 95.1 | 9.7 |
| 49A2 | 731.5 | 265.7 |
| 66B8 | 113.9 | 23.2 |
| 50A12 | 2005 | nd |
| 57F5 | no inhibition | nd |
| 3E12 | no inhibition | no inhibition |

[0445] These results show that the TREM-1 antibodies bind cyno TREM-1, and importantly inhibit ligand-induced TREM-1 activation in cyno primary cells (PBMCs). Additionally, FIG. 1 illustrates TREM1 antibodies inhibition of PGLYRP1/PGN mediated TREM1 signaling in both cyno and human PBMCs.

### Example 5—Efficacy of TREM-1 Fabs Blocking Spleen Tyrosine Kinase (SYK) Phosphorylation in a Human TREM-1/Dap12-HEK293 Overexpressing Cell Line

[0446] TREM-1 Fabs were assayed for the ability to block signaling by the inhibition of ligand binding to the TREM-1 receptor in a cell line overexpressing human TREM-1/Dap12 and IC50s determined. Phosphorylation of Spleen Tyrosine Kinase (SYK) is an early step in the TREM-1 signaling cascade and in this assay is used as a measure of TREM-1 signaling. HEK293 cells that overexpress human TREM-1 and its obligate adaptor protein DNAX activation protein of 12 kDa (Dap12) were seeded in CellBIND plates (Corning) at 50K/well in complete media (DMEM/10% FBS) and allowed to attach overnight. Bivalent TREM-1 antibodies were unable to inhibit signaling in this system, likely due to a technical artefact of a high abundance of TREM-1 receptors in these cells and the ability of bivalent antibodies to crosslink them resulting in ligand-independent receptor agonism. Therefore, monovalent Fabs were used as surrogates for full antibodies in this assay. Fourteen anti-TREM-1 Fabs were diluted (3× serial dilution) in complete media to generate final antibody concentrations ranging from 0.00017 nM to 30 nM. Fabs were pre-incubated with TREM-1/Dap12-HEK293s for 30 minutes before addition of the TREM-1 ligand-complexed human PGLYRP1 (R&D Systems) and soluble PGN from E. coli (InvivoGen). To complex the PGLYRP1 and PGN, the proteins were combined in a 1:2 ratio and incubated at 37° C. for 45 minutes before adding to the cells/Fabs. Following a one hour room temperature incubation, the cells were lysed and the amount of phosphorylated SYK in the cell lysate was measured using the pSYK ALPHALISA® SUREFIRE® Ultra™ p-SYK (Tyr525/526) assay (Perkin Elmer). Light emission at 615 nm was measured on an Envision 2103 multilabel plate reader. IC50 values were calculated using GraphPad Prism (v8.4.3) and are presented for two separate assays as shown in Table 16.

TABLE 16
Antibody Inhibition of Ligand Mediated Signaling
in a Cell Line Overexpressing Human TREM-1/DAP12
As Measured by SYK phosphorylation

| | Fab IC50-pSYK Assay | Fab IC50-pSYK Assay |
|---|---|---|
| Fab ID | (Trial 1) pM | (Trial 2) pM |
| 57C10 Fab | 273.4 | 582.9 |
| 30H2 Fab | 467.2 | 374.5 |
| 61B12 Fab | 112.0 | 568.8 |
| 61G5 Fab | 387.0 | 186.4 |
| 63F8 Fab | 45.2 | 38.0 |
| 64D7 Fab | 229.1 | 70.0 |
| 34D1 Fab | 313.8 | 309.2 |
| 44A5 Fab | 188.9 | 325.0 |
| 46H7 Fab | 43.3 | 116.9 |
| 49A2 Fab | 1175 | 786.9 |
| 66B8 Fab | 4662 | nd |
| 50A12 Fab | 2850 | nd |
| 57F5 Fab | no inhibition | nd |
| 3E12 Fab | no inhibition | nd |

[0447] FIG. 2 is a graph showing that anti-TREM1 Fabs inhibit PGLYRP1/PGN-mediated SYK phosphorylation in TREM1/DAP12-HEK293 cells.

### Example 6—In Vivo Assessment of TREM-1 Antibody in Cardiovascular Disease

[0448] Both acute and disease models are used to establish that blocking TREM-1 mediated signaling will reduce proinflammatory cytokine/chemokine release (acute response) and result in improved disease outcomes for atherosclerosis (Ath) and myocardial infarction (MI).

### Acute Models:

### Lipopolysaccharide (LPS)-Induced Inflammation Model

[0449] To determine whether blockade of TREM-1 by mouse TREM-1 extracellular domain/Fc (muTREM1-Fc), results in a reduction in the release of proinflammatory cytokines in mice that have been systemically challenged with lipopolysaccharide (LPS) an LPS-Induced Inflammation Model is used. Briefly, female C57Bl/6 mice (10-12 weeks) are randomly grouped (n=6 mice/treatment) and treated intraperitoneally (i.p.) with either 3, 10 or 30 mg/kg (mpk) of muTREM1-Fc or 30 mpk of mulgG1 (control). One hour later, 100 μg/animal of LPS from E. coli (055:B5) will be administered (i.p.) to the mice. Blood samples will be collected at 0, 1, 3, 6, and 24 hours. Serum levels of proinflammatory cytokines and chemokines (IFN-γ, IL-1β, IL-2, IL-4, IL-5, IL-6, IL-10, IL-12p70, KC/GRO, TNF-α) are measured using the V-PLEX Proinflammatory Panel 1 Mouse Kit (Meso Scale Discovery). Soluble TREM-1 (sTREM-1) levels are measured by ELISA (R&D Systems). In addition to muTREM1-Fc analysis in this model, anti-mouse TREM-1 antibodies can be characterized.

### TREM-1 Ligand Mediated Inflammation Model

[0450] Peptidoglycan recognition protein 1 (PGLYRP1) has been identified as a TREM-1 ligand (Read et al., 2015). PGLYRP1 alone or complexed with its endogenous binding target (bacterial peptidoglycan-PGN) is used to initiate an inflammatory response in C57B1I/6 mice in a dose range of 0.5 to 3 mpk (PGLYRP1) and 0.5 to 5 mpk (PGN). Prior to administration of PGLYRP1 or PGLYRP1/PGN, the mice are treated with anti-mouse TREM-1 antibodies, control antibodies or muTREM1-Fc (dose range 1-30 mpk). Given the relatively low expression of TREM-1 in mice, LPS, a toll-like receptor 4 ligand known to upregulate expression of TREM-1 (Zeng et al., 2007), may be administered 24 hours before treatment with antibody/TREM1-Fc and TREM-1 ligand. Blood samples are collected at 0, 1, 3, 6, and 24 hours. Serum levels of proinflammatory cytokines and chemokines (IFN-γ, IL-1β, IL-2, IL-4, IL-5, IL-6, IL-10, IL-12p70, KC/GRO, TNF-α) are measured using the V-PLEX Proinflammatory Panel 1 Mouse Kit (Meso Scale Discovery). sTREM-1 levels will be measured by ELISA (R&D Systems).

### NSG Humanized Mouse Model

[0451] NOD scid gamma (NSG) mice (Jackson Labs) are severely immunodeficient mice that can be readily engrafted with human hematopoietic stem cells which allows for the establishment of a functional, humanized immune system in a mouse model. Utilizing this humanized mouse model, an inflammatory response is initiated either by LPS treatment, TREM-1 ligand treatment or both as described above. Prior to initiating the inflammatory response, mice are treated with either anti-human TREM-1 or isotype control antibodies (dose range 1-30 mpk). Blood samples will be collected at 0, 1, 3, 6, and 24 hours. Serum levels of proinflammatory cytokines and chemokines (IFN-γ, IL-1β, IL-2, IL-4, IL-6, IL-8, IL-10, IL-12p70, IL-13, TNF-α) are measured using the V-PLEX Proinflammatory Panel 1 Human Kit (Meso Scale Discovery). sTREM-1 levels will be measured by ELISA (R&D Systems).

### Cynomolgus Monkey Model

[0452] Cynomolgus (Macaca fascicularis) monkeys are treated with anti-human (cross reactive with Cynomolgus monkey) TREM-1 antibodies in an LPS challenge model. Adult male Cynomolgus monkeys are randomized to receive an intravenous (i.v.) or subcutaneous (s.c.) dose of either TREM-1 antibody (dose range 1-30 mpk) or isotype control after administration of an i.v. bolus of LPS (10 ug/kg of body weight). An additional control group of monkeys receives only vehicle (no antibody/no LPS). Vital signs are monitored and blood samples collected at 0, 1, 2, 4, and 8 hours for clinical chemistries, leukocyte count, coagulation parameters, soluble TREM-1 and cytokine plasma concentrations.

### Disease Models:

[0453] ApoE−/−, LDLR−/−, A20 haploinsufficient/ApoE−/−

[0454] Mouse models of atherosclerosis (e.g. ApoE−/− or LDLR−/− mice on high cholesterol high fat diet for 12-16 weeks) are used to determine if treatment with anti-mouse TREM-1 antibodies modifies disease outcomes. Mice are randomized and cohorts are administered s.c. doses (ranging from 1-30 mpk) of either control antibody or anti-mouse TREM-1 antibody weekly during the high cholesterol diet feeding phase. Blood is collected at various timepoints and analyzed for cytokine/chemokine levels, soluble TREM-1 levels and myeloid cell subsets. Upon conclusion of the experiment, whole aortas will be collected and surface lesion area quantified by en face staining using oil red 0 or Sudan IV. In addition, sections at the aortic root are obtained and stained with oil red 0 to quantify lesion area, anti-CD68 antibody staining to quantify macrophage content, and anti-smooth muscle actin (SMA) antibody staining to quantify smooth muscle cell content as well as other stains. Another useful model is the A20 haploinsufficient/ApoE−/− mice which demonstrate increased levels of NF-kb driven proatherosclerotic/proinflammatory target genes resulting in increased atherosclerosis susceptibility (Wolfrum et al., 2007). If no suitable anti-mouse TREM-1 surrogate antibody is identified, a human TREM-1 knock-in mouse in an ApoE−/− background will be generated. This would allow testing of the anti-human TREM-1 antibodies in a mouse model of atherosclerosis.

### NSG Humanized Mouse Model

[0455] Should the NSG mice prove useful in the acute setting, this could be developed into a disease model by siRNA knockdown of ApoE, Ldlr or both. Randomized cohorts of NSG/siRNA treated mice on high fat high cholesterol diets for 12-16 weeks will be administered s.c. doses (ranging from 1-30 mpk) of either control antibody or anti-human TREM-1 antibody weekly during the high cholesterol diet feeding phase. Blood is collected at various timepoints and analyzed for cytokine/chemokine levels, soluble TREM-1 levels and myeloid cell subsets. Upon conclusion of the experiment, whole aortas are collected and surface lesion area quantified by en face staining and aortic root sections stained as described above.

### Rodent Acute Myocardial Infarction (AMI) Models

[0456] Rodent models of MI are useful to test the anti-mouse TREM-1 antibodies and/or muTREM1-Fc. Briefly, AMI is induced in either mice or rats by permanent ligation of the left anterior descending coronary artery (LAD). Following this procedure, rodents (rats=Sprague Dawley, mice=C57Bl/6) will be randomized and receive an s.c. dose (1-30 mpk) of either anti-mouse TREM-1 or isotype control antibody weekly for 2-8 weeks post ligation surgery. Cardiac function (e.g. ejection fraction, end diastolic volume, end systolic volumes and cardiac output) is assessed by noninvasive echocardiography at defined times throughout the study period. Terminal cardiac function and contractility will be measured with pressure volume loops. Blood samples are drawn at regular intervals to measure blood cell counts, liver and kidney enzymes, troponin, soluble TREM-1 and inflammatory markers (cytokines, hsCRP). At the conclusion of the study, rodents are euthanized and infarct size in relation to the area at risk (IS/AAR) will be determined by ex vivo histological staining. A similar study can be performed in which ligation of the LAD occurs for 90 minutes followed by removal of the ligation, the so called ischemia/reperfusion (I/R) model. The treatment scheme and analysis would be the same as described above.

### Mini Pig MI Model

[0457] Antibodies that may cross react with pig TREM-1, are tested in a mini-pig AMI model. Briefly, AMI is induced in minipigs (Sus scrofa domestic) by inflation of an angioplasty balloon in the proximal left anterior descending artery (LAD) for one hour. Animals are randomized to receive s.c. doses (1-30 mpk) of either a TREM-1 or isotype control antibody weekly for 2-4 weeks after surgery. Following administration of the initial dose of antibody at the time of surgery, the angioplasty balloon is deflated. Hemodynamic parameters including heart rate, mean arterial pressure, mean pulmonary artery pressure, cardiac output, cardiac index and mixed venous oxygen saturation will be monitored throughout the study period. Pressure-conductance catheter based parameters including end-diastolic and end-systolic volumes of the left ventricle, ejection fraction, maximum and minimum values of the first derivative of ventricular pressure (dP/dtmax, dP/dtmin), time constant of left ventricle pressure decay and stroke work will be monitored regularly throughout the study period. Pressure/volume data with vena cava occlusion is also collected, including end-systolic and end-diastolic pressure volume relationships, maximum ventricular elastance, arterial elastance, dp/dtmax to end diastolic volume relationship, pre-load recruitable stroke work and pressure volume area. Blood samples are drawn at regular intervals to measure blood gases, blood cell counts, blood lactates, liver and kidney enzymes, troponin, soluble TREM-1 and inflammatory markers (cytokines, hsCRP). At the conclusion of the study, pigs are euthanized and infarct size in relation to the area at risk (IS/AAR) will be determined by ex vivo histological staining.

[0458] It is hypothesized that administration of TREM-1 antibodies that block signaling through the receptor will down regulate inflammatory responses in the cardiac models and treat cardiovascular disease by reducing one or more symptoms of cardiovascular disease (e.g., atherosclerosis or myocardial infarction), such as inflammatory cell migration to the site of injury, infiltration of myeloid cells into cardiac tissue, inflammatory cytokines in the microenvironment, tissue damage, reduction in foam cell formation, reduction in necrotic core size, reduction in scar formation, reduction in endothelial cell dysfunction, and/or reduction in thrombus formation.

### Example 7—Genetic Ablation of TREM-1 Resulted in Decreased Levels of Serum Peptidoglycan Recognition Protein 1 (PGLYRP1) Following LPS Stimulation

[0459] TREM-1 knockout (C57Bl/6 background) and age/background matched mice (n=6) were injected (intraperitoneal) with 100 μg/animal Lipopolysaccharide (LPS) from E.Coli (055:B5) (Sigma-Aldrich). Twenty microliters of whole blood were drawn at 0, 1, 3, 6 and 24 hours post LPS administration. Serum from the two treatment groups (WT, TREM-1 KO) was pooled for each time point and PGLYRP1 concentrations were measured by ELISA (LSBio). Optical density at 450 nM was measured on a Molecular Devices SpectraMax Plus³⁸⁴ Spectrophotometer.

[0460] FIG. 3 is a graph showing a spike at 1 hour in TREM-1 ligand PGLYRP1 in wild-type but not TREM-1 knockout mice following administration of LPS. This data suggests that TREM-1 is involved in the regulation of PGLYRP1 and that an antibody targeting TREM-1 could both block ligand binding to the receptor and the subsequent availability of the PGLYRP1 ligand. Blocking the increase in PYGLYRP1 using a TREM-1 antibody may prevent a subsequent PYGLRP1-mediated inflammatory and cardiovascular event.

[0461] Any single embodiment herein may be supplemented with one or more element from any one or more other embodiment herein.

[0462] It is understood, therefore, that this invention is not limited to the particular embodiments disclosed, but is intended to cover all modifications which are within the spirit and scope of the invention as defined by the appended claims; the above description; the following numbered paragraphs, and/or shown in the attached drawings.

[0463] Numerous modifications and variations in the invention as set forth in the above illustrative examples are expected to occur to those skilled in the art. Consequently only such limitations as appear in the appended claims should be placed on the invention.

The application's sequence listing, which the Patent Office published only in electronic form, follows.

SEQUENCE LISTING (845 sequences)

SEQ ID NO: 1 - DNA, 905 bp, Artificial Sequence
  Synthetic
gtcccgggagccctcagcagcagttggagctggtgcacaggaaggatgaggaagaccaggctctgggggctgctgtggatgctctttgtctcagaactccgagctgcaactaaattaactgaggaaaagtatgaactgaaagaggggcagaccctggatgtgaaatgtgactacacgctagagaagtttgccagcagccagaaagcttggcagataataagggacggagagatgcccaagaccctggcatgcacagagaggccttcaaagaattcccatccagtccaagtggggaggatcatactagaagactaccatgatcatggtttactgcgcgtccgaatggtcaaccttcaagtggaagattctggactgtatcagtgtgtgatctaccagcctcccaaggagcctcacatgctgttcgatcgcatccgcttggtggtgaccaagggtttttcagggacccctggctccaatgagaattctacccagaatgtgtataagattcctcctaccaccactaaggccttgtgcccactctataccagccccagaactgtgacccaagctccacccaagtcaactgccgatgtctccactcctgactctgaaatcaaccttacaaatgtgacagatatcatcagggttccggtgttcaacattgtcattctcctggctggtggattcctgagtaagagcctggtcttctctgtcctgtttgctgtcacgctgaggtcatttgtaccctaggcccacgaacccacgagaatgtcctctgacttccagccacatccatctggcagttgtgccaagggaggagggaggaggtaaaaggcagggagttaataacatgaattaaatctgtaatcaccgccaaaaaaaaaaaaaaaaaaaaaaaaaaaaaa

SEQ ID NO: 2 - protein, 234 aa, Artificial Sequence
  Synthetic
MRKTRLWGLLWMLFVSELRAATKLTEEKYELKEGQTLDVKCDYTLEKFASSQKAWQIIRDGEMPKTLACTERPSKNSHPVQVGRIILEDYHDHGLLRVRMVNLQVEDSGLYQCVIYQPPKEPHMLFDRIRLVVTKGFSGTPGSNENSTQNVYKIPPTTTKALCPLYTSPRTVTQAPPKSTADVSTPDSEINLTNVTDIIRVPVFNIVILLAGGFLSKSLVFSVLFAVTLRSFVP

SEQ ID NO: 3 - DNA, 708 bp, Artificial Sequence
  Synthetic
atggacatgagggtgcccgctcagctcctggggctcctgctgctgtggctgagaggtgcgcgctgtgacatccagatgacccagtttccatcttccgtgtctgcatctgtaggagacagagtcaccatcacttgtcgggcgagtcaggggattagcaggtggttagcctggtatcagcagaaacaagggaaagcccctaagctcctgatctatatggtatccagtttgcaaagtggggtcccatcaaggttcagtggcagtggatctgggacagatttcactctcaccatcagcagcctgcagcctgaagattttgcaacttactattgtcagcagtctcacaatttcccgatcaccttcggccaagggacacgactggacattaaacgaacggtggctgcaccatctgtcttcatcttcccgccatctgatgagcagttgaaatctggaactgcctctgttgtgtgcctgctgaataacttctatcccagagaggccaaagtacagtggaaggtggataacgccctccaatcgggtaactcccaggagagtgtcacagagcaggacagcaaggacagcacctacagcctcagcagcaccctgacgctgagcaaagcagactacgagaaacacaaagtctacgcctgcgaagtcacccatcagggcctgagctcgcccgtcacaaagagcttcaacaggggagagtgt

SEQ ID NO: 4 - DNA, 1413 bp, Artificial Sequence
  Synthetic
atggacatgagggtgcccgctcagctcctggggctcctgctgctgtggctgagaggtgcgcgctgtcaggtgcagctggtgcagtctggggctgaggtgaagaagcctggggcctcagtgaaggtctcctgcaaggcttctggatacaccttcaccggctactatatgcactgggtgcgacaggcccctggacaagggcttgagtggatgggatggttcaaacctaatagtggtgtcacaaactatgcacagaagtttcagggcagggtcaccatgagcagggacacgtccatcagcacagcctacatggagctgagcagcctgagatctgacgacacggccgtgtattactgtgcgagagccggatacagcaccagttggaaagactggttcgacccctggggccagggaaccctggtcaccgtctcttcagccagcaccaaggggccatccgtcttccccctggcgccctgctccaggagcacctccgagagcacagccgccctgggctgcctggtcaaggactacttccccgaaccggtgacggtgtcgtggaactcaggcgccctgaccagcggcgtgcacaccttcccggctgtcctacagtcctcaggactctactccctcagcagcgtggtgaccgtgccctccagcagcttgggcacgaagacctacacctgcaacgtagatcacaagcccagcaacaccaaggtggacaagagagttgagtccaaatatggtcccccatgcccatcatgcccagcacctgagttcctggggggaccatcagtcttcctgttccccccaaaacccaaggacactctcatgatctcccggacccctgaggtcacgtgcgtggtggtggacgtgagccaggaagaccccgaggtccagttcaactggtacgtggatggcgtggaggtgcataatgccaagacaaagccgcgggaggagcagttcaacagcacgtaccgtgtggtcagcgtcctcaccgtcctgcaccaggactggctgaacggcaaggagtacaagtgcaaggtctccaacaaaggcctcccgtcctccatcgagaaaaccatctccaaagccaaagggcagccccgagagccacaggtgtacaccctgcccccatcccaggaggagatgaccaagaaccaggtcagcctgacctgcctggtcaaaggcttctaccccagcgacatcgccgtggagtgggagagcaatgggcagccggagaacaactacaagaccacgcctcccgtgctggactccgacggctccttcttcctctacagcaggctaaccgtggacaagagcaggtggcaggaggggaatgtcttctcatgctccgtgatgcatgaggctctgcacaaccactacacacagaagagcctctccctgtctctgggcaaa

SEQ ID NO: 5 - protein, 236 aa, Artificial Sequence
  Synthetic
MDMRVPAQLLGLLLLWLRGARCDIQMTQFPSSVSASVGDRVTITCRASQGISRWLAWYQQKQGKAPKLLIYMVSSLQSGVPSRFSGSGSGTDFTLTISSLQPEDFATYYCQQSHNFPITFGQGTRLDIKRTVAAPSVFIFPPSDEQLKSGTASVVCLLNNFYPREAKVQWKVDNALQSGNSQESVTEQDSKDSTYSLSSTLTLSKADYEKHKVYACEVTHQGLSSPVTKSFNRGEC

SEQ ID NO: 6 - protein, 471 aa, Artificial Sequence
  Synthetic
MDMRVPAQLLGLLLLWLRGARCQVQLVQSGAEVKKPGASVKVSCKASGYTFTGYYMHWVRQAPGQGLEWMGWFKPNSGVTNYAQKFQGRVTMSRDTSISTAYMELSSLRSDDTAVYYCARAGYSTSWKDWFDPWGQGTLVTVSSASTKGPSVFPLAPCSRSTSESTAALGCLVKDYFPEPVTVSWNSGALTSGVHTFPAVLQSSGLYSLSSVVTVPSSSLGTKTYTCNVDHKPSNTKVDKRVESKYGPPCPSCPAPEFLGGPSVFLFPPKPKDTLMISRTPEVTCVVVDVSQEDPEVQFNWYVDGVEVHNAKTKPREEQFNSTYRVVSVLTVLHQDWLNGKEYKCKVSNKGLPSSIEKTISKAKGQPREPQVYTLPPSQEEMTKNQVSLTCLVKGFYPSDIAVEWESNGQPENNYKTTPPVLDSDGSFFLYSRLTVDKSRWQEGNVFSCSVMHEALHNHYTQKSLSLSLGK

SEQ ID NO: 7 - DNA, 33 bp, Artificial Sequence
  Synthetic
cgggcgagtcaggggattagcaggtggttagcc

SEQ ID NO: 8 - DNA, 21 bp, Artificial Sequence
  Synthetic
atggtatccagtttgcaaagt

SEQ ID NO: 9 - DNA, 27 bp, Artificial Sequence
  Synthetic
cagcagtctcacaatttcccgatcacc

SEQ ID NO: 10 - protein, 11 aa, Artificial Sequence
  Synthetic
RASQGISRWLA

SEQ ID NO: 11 - protein, 7 aa, Artificial Sequence
  Synthetic
MVSSLQS

SEQ ID NO: 12 - protein, 9 aa, Artificial Sequence
  Synthetic
QQSHNFPIT

SEQ ID NO: 13 - DNA, 15 bp, Artificial Sequence
  Synthetic
ggctactatatgcac

SEQ ID NO: 14 - DNA, 51 bp, Artificial Sequence
  Synthetic
tggttcaaacctaatagtggtgtcacaaactatgcacagaagtttcagggc

SEQ ID NO: 15 - DNA, 39 bp, Artificial Sequence
  Synthetic
gccggatacagcaccagttggaaagactggttcgacccc

SEQ ID NO: 16 - protein, 5 aa, Artificial Sequence
  Synthetic
GYYMH

SEQ ID NO: 17 - protein, 17 aa, Artificial Sequence
  Synthetic
WFKPNSGVTNYAQKFQG

SEQ ID NO: 18 - protein, 13 aa, Artificial Sequence
  Synthetic
AGYSTSWKDWFDP

SEQ ID NO: 19 - DNA, 321 bp, Artificial Sequence
  Synthetic
gacatccagatgacccagtttccatcttccgtgtctgcatctgtaggagacagagtcaccatcacttgtcgggcgagtcaggggattagcaggtggttagcctggtatcagcagaaacaagggaaagcccctaagctcctgatctatatggtatccagtttgcaaagtggggtcccatcaaggttcagtggcagtggatctgggacagatttcactctcaccatcagcagcctgcagcctgaagattttgcaacttactattgtcagcagtctcacaatttcccgatcaccttcggccaagggacacgactggacattaaa

SEQ ID NO: 20 - DNA, 366 bp, Artificial Sequence
  Synthetic
caggtgcagctggtgcagtctggggctgaggtgaagaagcctggggcctcagtgaaggtctcctgcaaggcttctggatacaccttcaccggctactatatgcactgggtgcgacaggcccctggacaagggcttgagtggatgggatggttcaaacctaatagtggtgtcacaaactatgcacagaagtttcagggcagggtcaccatgagcagggacacgtccatcagcacagcctacatggagctgagcagcctgagatctgacgacacggccgtgtattactgtgcgagagccggatacagcaccagttggaaagactggttcgacccctggggccagggaaccctggtcaccgtctcttca

SEQ ID NO: 21 - protein, 107 aa, Artificial Sequence
  Synthetic
DIQMTQFPSSVSASVGDRVTITCRASQGISRWLAWYQQKQGKAPKLLIYMVSSLQSGVPSRFSGSGSGTDFTLTISSLQPEDFATYYCQQSHNFPITFGQGTRLDIK

SEQ ID NO: 22 - protein, 122 aa, Artificial Sequence
  Synthetic
QVQLVQSGAEVKKPGASVKVSCKASGYTFTGYYMHWVRQAPGQGLEWMGWFKPNSGVTNYAQKFQGRVTMSRDTSISTAYMELSSLRSDDTAVYYCARAGYSTSWKDWFDPWGQGTLVTVSS

SEQ ID NO: 23 - DNA, 708 bp, Artificial Sequence
  Synthetic
atggacatgagggtgcccgctcagctcctggggctcctgctgctgtggctgagaggtgcgcgctgtgacacccagatgacccagtctccatcctccctgtctgcatctgaaggagacagagtcaccatcacttgccaggcgagtcaggacattttcaacgatttaaattggtatcaggagaaaccagggaaagcccctaagctcctgatctaccatgcatccaatttggaaacaggggtcccatcaaggttcagtggaagtggatctgggacagattatactttcaccatcagcagcctgcagcctgaagatattgctacatattactgtcaacaatatggaaatctcccgctcactttcggcggagggaccaaggtggagatcaaacgaacggtggctgcaccatctgtcttcatcttcccgccatctgatgagcagttgaaatctggaactgcctctgttgtgtgcctgctgaataacttctatcccagagaggccaaagtacagtggaaggtggataacgccctccaatcgggtaactcccaggagagtgtcacagagcaggacagcaaggacagcacctacagcctcagcagcaccctgacgctgagcaaagcagactacgagaaacacaaagtctacgcctgcgaagtcacccatcagggcctgagctcgcccgtcacaaagagcttcaacaggggagagtgt

SEQ ID NO: 24 - DNA, 1419 bp, Artificial Sequence
  Synthetic
atggacatgagggtgcccgctcagctcctggggctcctgctgctgtggctgagaggtgcgcgctgtcaggtgcagctggtgcagtctggggctgaggtgaagaagcctggggcctcagtgaaggtctcctgcaaggcttctggatacaccttcaccagttatgatatcaactgggtgcgacaggccactggacaagggcttgagtggatgggatggatgaaccctaacaggggtaacacaggctatgtaaagaagttccagggcagagtcaccatgaccaggaacacctccataagcacagcctacatggagctgagtagtctgagatctgaggacacggccgtgtattactgtgcgagaaggagggccgtgtatcgcagcagctgggagtggtacttcgatctctggggccgtggcaccctggtcactgtctcctcagccagcaccaaggggccatccgtcttccccctggcgccctgctccaggagcacctccgagagcacagccgccctgggctgcctggtcaaggactacttccccgaaccggtgacggtgtcgtggaactcaggcgccctgaccagcggcgtgcacaccttcccggctgtcctacagtcctcaggactctactccctcagcagcgtggtgaccgtgccctccagcagcttgggcacgaagacctacacctgcaacgtagatcacaagcccagcaacaccaaggtggacaagagagttgagtccaaatatggtcccccatgcccatcatgcccagcacctgagttcctggggggaccatcagtcttcctgttccccccaaaacccaaggacactctcatgatctcccggacccctgaggtcacgtgcgtggtggtggacgtgagccaggaagaccccgaggtccagttcaactggtacgtggatggcgtggaggtgcataatgccaagacaaagccgcgggaggagcagttcaacagcacgtaccgtgtggtcagcgtcctcaccgtcctgcaccaggactggctgaacggcaaggagtacaagtgcaaggtctccaacaaaggcctcccgtcctccatcgagaaaaccatctccaaagccaaagggcagccccgagagccacaggtgtacaccctgcccccatcccaggaggagatgaccaagaaccaggtcagcctgacctgcctggtcaaaggcttctaccccagcgacatcgccgtggagtgggagagcaatgggcagccggagaacaactacaagaccacgcctcccgtgctggactccgacggctccttcttcctctacagcaggctaaccgtggacaagagcaggtggcaggaggggaatgtcttctcatgctccgtgatgcatgaggctctgcacaaccactacacacagaagagcctctccctgtctctgggcaaa

SEQ ID NO: 25 - protein, 236 aa, Artificial Sequence
  Synthetic
MDMRVPAQLLGLLLLWLRGARCDTQMTQSPSSLSASEGDRVTITCQASQDIFNDLNWYQEKPGKAPKLLIYHASNLETGVPSRFSGSGSGTDYTFTISSLQPEDIATYYCQQYGNLPLTFGGGTKVEIKRTVAAPSVFIFPPSDEQLKSGTASVVCLLNNFYPREAKVQWKVDNALQSGNSQESVTEQDSKDSTYSLSSTLTLSKADYEKHKVYACEVTHQGLSSPVTKSFNRGEC

SEQ ID NO: 26 - protein, 473 aa, Artificial Sequence
  Synthetic
MDMRVPAQLLGLLLLWLRGARCQVQLVQSGAEVKKPGASVKVSCKASGYTFTSYDINWVRQATGQGLEWMGWMNPNRGNTGYVKKFQGRVTMTRNTSISTAYMELSSLRSEDTAVYYCARRRAVYRSSWEWYFDLWGRGTLVTVSSASTKGPSVFPLAPCSRSTSESTAALGCLVKDYFPEPVTVSWNSGALTSGVHTFPAVLQSSGLYSLSSVVTVPSSSLGTKTYTCNVDHKPSNTKVDKRVESKYGPPCPSCPAPEFLGGPSVFLFPPKPKDTLMISRTPEVTCVVVDVSQEDPEVQFNWYVDGVEVHNAKTKPREEQFNSTYRVVSVLTVLHQDWLNGKEYKCKVSNKGLPSSIEKTISKAKGQPREPQVYTLPPSQEEMTKNQVSLTCLVKGFYPSDIAVEWESNGQPENNYKTTPPVLDSDGSFFLYSRLTVDKSRWQEGNVFSCSVMHEALHNHYTQKSLSLSLGK

SEQ ID NO: 27 - DNA, 33 bp, Artificial Sequence
  Synthetic
caggcgagtcaggacattttcaacgatttaaat

SEQ ID NO: 28 - DNA, 21 bp, Artificial Sequence
  Synthetic
catgcatccaatttggaaaca

SEQ ID NO: 29 - DNA, 27 bp, Artificial Sequence
  Synthetic
caacaatatggaaatctcccgctcact

SEQ ID NO: 30 - protein, 11 aa, Artificial Sequence
  Synthetic
QASQDIFNDLN

SEQ ID NO: 31 - protein, 7 aa, Artificial Sequence
  Synthetic
HASNLET

SEQ ID NO: 32 - protein, 9 aa, Artificial Sequence
  Synthetic
QQYGNLPLT

SEQ ID NO: 33 - DNA, 15 bp, Artificial Sequence
  Synthetic
agttatgatatcaac

SEQ ID NO: 34 - DNA, 51 bp, Artificial Sequence
  Synthetic
tggatgaaccctaacaggggtaacacaggctatgtaaagaagttccagggc

SEQ ID NO: 35 - DNA, 45 bp, Artificial Sequence
  Synthetic
aggagggccgtgtatcgcagcagctgggagtggtacttcgatctc

SEQ ID NO: 36 - protein, 5 aa, Artificial Sequence
  Synthetic
SYDIN

SEQ ID NO: 37 - protein, 17 aa, Artificial Sequence
  Synthetic
WMNPNRGNTGYVKKFQG

SEQ ID NO: 38 - protein, 15 aa, Artificial Sequence
  Synthetic
RRAVYRSSWEWYFDL

SEQ ID NO: 39 - DNA, 321 bp, Artificial Sequence
  Synthetic
gacacccagatgacccagtctccatcctccctgtctgcatctgaaggagacagagtcaccatcacttgccaggcgagtcaggacattttcaacgatttaaattggtatcaggagaaaccagggaaagcccctaagctcctgatctaccatgcatccaatttggaaacaggggtcccatcaaggttcagtggaagtggatctgggacagattatactttcaccatcagcagcctgcagcctgaagatattgctacatattactgtcaacaatatggaaatctcccgctcactttcggcggagggaccaaggtggagatcaaa

SEQ ID NO: 40 - DNA, 372 bp, Artificial Sequence
  Synthetic
caggtgcagctggtgcagtctggggctgaggtgaagaagcctggggcctcagtgaaggtctcctgcaaggcttctggatacaccttcaccagttatgatatcaactgggtgcgacaggccactggacaagggcttgagtggatgggatggatgaaccctaacaggggtaacacaggctatgtaaagaagttccagggcagagtcaccatgaccaggaacacctccataagcacagcctacatggagctgagtagtctgagatctgaggacacggccgtgtattactgtgcgagaaggagggccgtgtatcgcagcagctgggagtggtacttcgatctctggggccgtggcaccctggtcactgtctcctca

SEQ ID NO: 41 - protein, 107 aa, Artificial Sequence
  Synthetic
DTQMTQSPSSLSASEGDRVTITCQASQDIFNDLNWYQEKPGKAPKLLIYHASNLETGVPSRFSGSGSGTDYTFTISSLQPEDIATYYCQQYGNLPLTFGGGTKVEIK

SEQ ID NO: 42 - protein, 124 aa, Artificial Sequence
  Synthetic
QVQLVQSGAEVKKPGASVKVSCKASGYTFTSYDINWVRQATGQGLEWMGWMNPNRGNTGYVKKFQGRVTMTRNTSISTAYMELSSLRSEDTAVYYCARRRAVYRSSWEWYFDLWGRGTLVTVSS

SEQ ID NO: 43 - DNA, 708 bp, Artificial Sequence
  Synthetic
atggacatgagggtgcccgctcagctcctggggctcctgctgctgtggctgagaggtgcgcgctgtgacatccagatgacccagtctccatcctccctgtctgcatctgtaggagacagagtcaccatcacttgccaggcgagtcaggacattagcaaacatttaaattggtatcagcagaaaccagggaaagcccctaagctcctgatctacgatacctccaatttggaaacaggggtcccatcaaggttcagtggaagtggatctgggacagattttactttcaccatcagcagcctgcagcctgaagatattgcaacatataactgtcaacagtatgataagctcccgctcactttcggcggagggaccaaggtggagatcaagcgaacggtggctgcaccatctgtcttcatcttcccgccatctgatgagcagttgaaatctggaactgcctctgttgtgtgcctgctgaataacttctatcccagagaggccaaagtacagtggaaggtggataacgccctccaatcgggtaactcccaggagagtgtcacagagcaggacagcaaggacagcacctacagcctcagcagcaccctgacgctgagcaaagcagactacgagaaacacaaagtctacgcctgcgaagtcacccatcagggcctgagctcgcccgtcacaaagagcttcaacaggggagagtgt

SEQ ID NO: 44 - DNA, 1413 bp, Artificial Sequence
  Synthetic
atggacatgagggtgcccgctcagctcctggggctcctgctgctgtggctgagaggtgcgcgctgtcaggtgcagctggtgcagtctggggctgaggtgaagaagcctggggcctcagtgaaggtctcctgcaaggcttctggatacaccttcaccagttatgatatcaactgggtgcgacaggccactggacaagggcttgagtggatgggaaggatgaaccctaagagtggtaatgcaggctatgtacagaacttccggggcagagtcaccatgaccaggaacacctccataagcacagcctacatggagctgagcagcctgagatctgaggacacggccgtgtattactgtgcgagaggcgggcgtaccagcatctggtccttcgtctttgattactggggccagggcaccctggtcaccgtctcctcagccagcaccaaggggccatccgtcttccccctggcgccctgctccaggagcacctccgagagcacagccgccctgggctgcctggtcaaggactacttccccgaaccggtgacggtgtcgtggaactcaggcgccctgaccagcggcgtgcacaccttcccggctgtcctacagtcctcaggactctactccctcagcagcgtggtgaccgtgccctccagcagcttgggcacgaagacctacacctgcaacgtagatcacaagcccagcaacaccaaggtggacaagagagttgagtccaaatatggtcccccatgcccatcatgcccagcacctgagttcctggggggaccatcagtcttcctgttccccccaaaacccaaggacactctcatgatctcccggacccctgaggtcacgtgcgtggtggtggacgtgagccaggaagaccccgaggtccagttcaactggtacgtggatggcgtggaggtgcataatgccaagacaaagccgcgggaggagcagttcaacagcacgtaccgtgtggtcagcgtcctcaccgtcctgcaccaggactggctgaacggcaaggagtacaagtgcaaggtctccaacaaaggcctcccgtcctccatcgagaaaaccatctccaaagccaaagggcagccccgagagccacaggtgtacaccctgcccccatcccaggaggagatgaccaagaaccaggtcagcctgacctgcctggtcaaaggcttctaccccagcgacatcgccgtggagtgggagagcaatgggcagccggagaacaactacaagaccacgcctcccgtgctggactccgacggctccttcttcctctacagcaggctaaccgtggacaagagcaggtggcaggaggggaatgtcttctcatgctccgtgatgcatgaggctctgcacaaccactacacacagaagagcctctccctgtctctgggcaaa

SEQ ID NO: 45 - protein, 236 aa, Artificial Sequence
  Synthetic
MDMRVPAQLLGLLLLWLRGARCDIQMTQSPSSLSASVGDRVTITCQASQDISKHLNWYQQKPGKAPKLLIYDTSNLETGVPSRFSGSGSGTDFTFTISSLQPEDIATYNCQQYDKLPLTFGGGTKVEIKRTVAAPSVFIFPPSDEQLKSGTASVVCLLNNFYPREAKVQWKVDNALQSGNSQESVTEQDSKDSTYSLSSTLTLSKADYEKHKVYACEVTHQGLSSPVTKSFNRGEC

SEQ ID NO: 46 - protein, 471 aa, Artificial Sequence
  Synthetic
MDMRVPAQLLGLLLLWLRGARCQVQLVQSGAEVKKPGASVKVSCKASGYTFTSYDINWVRQATGQGLEWMGRMNPKSGNAGYVQNFRGRVTMTRNTSISTAYMELSSLRSEDTAVYYCARGGRTSIWSFVFDYWGQGTLVTVSSASTKGPSVFPLAPCSRSTSESTAALGCLVKDYFPEPVTVSWNSGALTSGVHTFPAVLQSSGLYSLSSVVTVPSSSLGTKTYTCNVDHKPSNTKVDKRVESKYGPPCPSCPAPEFLGGPSVFLFPPKPKDTLMISRTPEVTCVVVDVSQEDPEVQFNWYVDGVEVHNAKTKPREEQFNSTYRVVSVLTVLHQDWLNGKEYKCKVSNKGLPSSIEKTISKAKGQPREPQVYTLPPSQEEMTKNQVSLTCLVKGFYPSDIAVEWESNGQPENNYKTTPPVLDSDGSFFLYSRLTVDKSRWQEGNVFSCSVMHEALHNHYTQKSLSLSLGK

SEQ ID NO: 47 - DNA, 33 bp, Artificial Sequence
  Synthetic
caggcgagtcaggacattagcaaacatttaaat

SEQ ID NO: 48 - DNA, 21 bp, Artificial Sequence
  Synthetic
gatacctccaatttggaaaca

SEQ ID NO: 49 - DNA, 27 bp, Artificial Sequence
  Synthetic
caacagtatgataagctcccgctcact

SEQ ID NO: 50 - protein, 11 aa, Artificial Sequence
  Synthetic
QASQDISKHLN

SEQ ID NO: 51 - protein, 7 aa, Artificial Sequence
  Synthetic
DTSNLET

SEQ ID NO: 52 - protein, 9 aa, Artificial Sequence
  Synthetic
QQYDKLPLT

SEQ ID NO: 53 - DNA, 15 bp, Artificial Sequence
  Synthetic
agttatgatatcaac

SEQ ID NO: 54 - DNA, 51 bp, Artificial Sequence
  Synthetic
aggatgaaccctaagagtggtaatgcaggctatgtacagaacttccggggc

SEQ ID NO: 55 - DNA, 39 bp, Artificial Sequence
  Synthetic
ggcgggcgtaccagcatctggtccttcgtctttgattac

SEQ ID NO: 56 - protein, 5 aa, Artificial Sequence
  Synthetic
SYDIN

SEQ ID NO: 57 - protein, 17 aa, Artificial Sequence
  Synthetic
RMNPKSGNAGYVQNFRG

SEQ ID NO: 58 - protein, 13 aa, Artificial Sequence
  Synthetic
GGRTSIWSFVFDY

SEQ ID NO: 59 - DNA, 321 bp, Artificial Sequence
  Synthetic
gacatccagatgacccagtctccatcctccctgtctgcatctgtaggagacagagtcaccatcacttgccaggcgagtcaggacattagcaaacatttaaattggtatcagcagaaaccagggaaagcccctaagctcctgatctacgatacctccaatttggaaacaggggtcccatcaaggttcagtggaagtggatctgggacagattttactttcaccatcagcagcctgcagcctgaagatattgcaacatataactgtcaacagtatgataagctcccgctcactttcggcggagggaccaaggtggagatcaag

SEQ ID NO: 60 - DNA, 366 bp, Artificial Sequence
  Synthetic
caggtgcagctggtgcagtctggggctgaggtgaagaagcctggggcctcagtgaaggtctcctgcaaggcttctggatacaccttcaccagttatgatatcaactgggtgcgacaggccactggacaagggcttgagtggatgggaaggatgaaccctaagagtggtaatgcaggctatgtacagaacttccggggcagagtcaccatgaccaggaacacctccataagcacagcctacatggagctgagcagcctgagatctgaggacacggccgtgtattactgtgcgagaggcgggcgtaccagcatctggtccttcgtctttgattactggggccagggcaccctggtcaccgtctcctca

SEQ ID NO: 61 - protein, 107 aa, Artificial Sequence
  Synthetic
DIQMTQSPSSLSASVGDRVTITCQASQDISKHLNWYQQKPGKAPKLLIYDTSNLETGVPSRFSGSGSGTDFTFTISSLQPEDIATYNCQQYDKLPLTFGGGTKVEIK

SEQ ID NO: 62 - protein, 122 aa, Artificial Sequence
  Synthetic
QVQLVQSGAEVKKPGASVKVSCKASGYTFTSYDINWVRQATGQGLEWMGRMNPKSGNAGYVQNFRGRVTMTRNTSISTAYMELSSLRSEDTAVYYCARGGRTSIWSFVFDYWGQGTLVTVSS

SEQ ID NO: 63 - DNA, 708 bp, Artificial Sequence
  Synthetic
atggacatgagggtgcccgctcagctcctggggctcctgctgctgtggctgagaggtgcgcgctgtgacatccagatgacccagtctccatcctccctgtctgcatctgtaggagacagagtcaccatcacttgccaggcgagtcgggacattagcaagtatttaaattggtatcaacagaaaccagggaaagcccccaaactccagatctacgatgcatccaatttggaaacaggggtcccatcaaggttcagtggaagtggatctgggacagattttactttcaccatcagcagcctgcagcctgaagatattgcaacatattactgtcaacactatgataatatcccgatcacctttggccaggggacaagactggagattaaacgaacggtggctgcaccatctgtcttcatcttcccgccatctgatgagcagttgaaatctggaactgcctctgttgtgtgcctgctgaataacttctatcccagagaggccaaagtacagtggaaggtggataacgccctccaatcgggtaactcccaggagagtgtcacagagcaggacagcaaggacagcacctacagcctcagcagcaccctgacgctgagcaaagcagactacgagaaacacaaagtctacgcctgcgaagtcacccatcagggcctgagctcgcccgtcacaaagagcttcaacaggggagagtgt

SEQ ID NO: 64 - DNA, 1416 bp, Artificial Sequence
  Synthetic
atggacatgagggtgcccgctcagctcctggggctcctgctgctgtggctgagaggtgcgcgctgtcaggtgcagctggtgcagtctggggctgaggtgaagaagcctggggcctcagtgaaggtctcctgcaaggcttctggatacaccttcaccagttatgatatcaattgggtgcgacaggccactggacaagggcttgagtggatgggatggatgaaccctaacagtggtaactcaggctctgtaaagaagttccgggacagagtcaccatgaccaggaacacctccataagcactgcctacatggaattgagcagcctgagatctgaggacacggccgtgtattactgtgtgagacttatagggtatagcagtgcctggaagtggtccttccagcactggggccagggcaccctggtcaccgtctcctcagccagcaccaaggggccatccgtcttccccctggcgccctgctccaggagcacctccgagagcacagccgccctgggctgcctggtcaaggactacttccccgaaccggtgacggtgtcgtggaactcaggcgccctgaccagcggcgtgcacaccttcccggctgtcctacagtcctcaggactctactccctcagcagcgtggtgaccgtgccctccagcagcttgggcacgaagacctacacctgcaacgtagatcacaagcccagcaacaccaaggtggacaagagagttgagtccaaatatggtcccccatgcccatcatgcccagcacctgagttcctggggggaccatcagtcttcctgttccccccaaaacccaaggacactctcatgatctcccggacccctgaggtcacgtgcgtggtggtggacgtgagccaggaagaccccgaggtccagttcaactggtacgtggatggcgtggaggtgcataatgccaagacaaagccgcgggaggagcagttcaacagcacgtaccgtgtggtcagcgtcctcaccgtcctgcaccaggactggctgaacggcaaggagtacaagtgcaaggtctccaacaaaggcctcccgtcctccatcgagaaaaccatctccaaagccaaagggcagccccgagagccacaggtgtacaccctgcccccatcccaggaggagatgaccaagaaccaggtcagcctgacctgcctggtcaaaggcttctaccccagcgacatcgccgtggagtgggagagcaatgggcagccggagaacaactacaagaccacgcctcccgtgctggactccgacggctccttcttcctctacagcaggctaaccgtggacaagagcaggtggcaggaggggaatgtcttctcatgctccgtgatgcatgaggctctgcacaaccactacacacagaagagcctctccctgtctctgggcaaa

SEQ ID NO: 65 - protein, 236 aa, Artificial Sequence
  Synthetic
MDMRVPAQLLGLLLLWLRGARCDIQMTQSPSSLSASVGDRVTITCQASRDISKYLNWYQQKPGKAPKLQIYDASNLETGVPSRFSGSGSGTDFTFTISSLQPEDIATYYCQHYDNIPITFGQGTRLEIKRTVAAPSVFIFPPSDEQLKSGTASVVCLLNNFYPREAKVQWKVDNALQSGNSQESVTEQDSKDSTYSLSSTLTLSKADYEKHKVYACEVTHQGLSSPVTKSFNRGEC

SEQ ID NO: 66 - protein, 472 aa, Artificial Sequence
  Synthetic
MDMRVPAQLLGLLLLWLRGARCQVQLVQSGAEVKKPGASVKVSCKASGYTFTSYDINWVRQATGQGLEWMGWMNPNSGNSGSVKKFRDRVTMTRNTSISTAYMELSSLRSEDTAVYYCVRLIGYSSAWKWSFQHWGQGTLVTVSSASTKGPSVFPLAPCSRSTSESTAALGCLVKDYFPEPVTVSWNSGALTSGVHTFPAVLQSSGLYSLSSVVTVPSSSLGTKTYTCNVDHKPSNTKVDKRVESKYGPPCPSCPAPEFLGGPSVFLFPPKPKDTLMISRTPEVTCVVVDVSQEDPEVQFNWYVDGVEVHNAKTKPREEQFNSTYRVVSVLTVLHQDWLNGKEYKCKVSNKGLPSSIEKTISKAKGQPREPQVYTLPPSQEEMTKNQVSLTCLVKGFYPSDIAVEWESNGQPENNYKTTPPVLDSDGSFFLYSRLTVDKSRWQEGNVFSCSVMHEALHNHYTQKSLSLSLGK

SEQ ID NO: 67 - DNA, 33 bp, Artificial Sequence
  Synthetic
caggcgagtcgggacattagcaagtatttaaat

SEQ ID NO: 68 - DNA, 21 bp, Artificial Sequence
  Synthetic
gatgcatccaatttggaaaca

SEQ ID NO: 69 - DNA, 27 bp, Artificial Sequence
  Synthetic
caacactatgataatatcccgatcacc

SEQ ID NO: 70 - protein, 11 aa, Artificial Sequence
  Synthetic
QASRDISKYLN

SEQ ID NO: 71 - protein, 7 aa, Artificial Sequence
  Synthetic
DASNLET

SEQ ID NO: 72 - protein, 9 aa, Artificial Sequence
  Synthetic
QHYDNIPIT

SEQ ID NO: 73 - DNA, 15 bp, Artificial Sequence
  Synthetic
agttatgatatcaat

SEQ ID NO: 74 - DNA, 51 bp, Artificial Sequence
  Synthetic
tggatgaaccctaacagtggtaactcaggctctgtaaagaagttccgggac

SEQ ID NO: 75 - DNA, 42 bp, Artificial Sequence
  Synthetic
cttatagggtatagcagtgcctggaagtggtccttccagcac

SEQ ID NO: 76 - protein, 5 aa, Artificial Sequence
  Synthetic
SYDIN

SEQ ID NO: 77 - protein, 17 aa, Artificial Sequence
  Synthetic
WMNPNSGNSGSVKKFRD

SEQ ID NO: 78 - protein, 14 aa, Artificial Sequence
  Synthetic
LIGYSSAWKWSFQH

SEQ ID NO: 79 - DNA, 321 bp, Artificial Sequence
  Synthetic
gacatccagatgacccagtctccatcctccctgtctgcatctgtaggagacagagtcaccatcacttgccaggcgagtcgggacattagcaagtatttaaattggtatcaacagaaaccagggaaagcccccaaactccagatctacgatgcatccaatttggaaacaggggtcccatcaaggttcagtggaagtggatctgggacagattttactttcaccatcagcagcctgcagcctgaagatattgcaacatattactgtcaacactatgataatatcccgatcacctttggccaggggacaagactggagattaaa

SEQ ID NO: 80 - DNA, 369 bp, Artificial Sequence
  Synthetic
caggtgcagctggtgcagtctggggctgaggtgaagaagcctggggcctcagtgaaggtctcctgcaaggcttctggatacaccttcaccagttatgatatcaattgggtgcgacaggccactggacaagggcttgagtggatgggatggatgaaccctaacagtggtaactcaggctctgtaaagaagttccgggacagagtcaccatgaccaggaacacctccataagcactgcctacatggaattgagcagcctgagatctgaggacacggccgtgtattactgtgtgagacttatagggtatagcagtgcctggaagtggtccttccagcactggggccagggcaccctggtcaccgtctcctca

SEQ ID NO: 81 - protein, 107 aa, Artificial Sequence
  Synthetic
DIQMTQSPSSLSASVGDRVTITCQASRDISKYLNWYQQKPGKAPKLQIYDASNLETGVPSRFSGSGSGTDFTFTISSLQPEDIATYYCQHYDNIPITFGQGTRLEIK

SEQ ID NO: 82 - protein, 123 aa, Artificial Sequence
  Synthetic
QVQLVQSGAEVKKPGASVKVSCKASGYTFTSYDINWVRQATGQGLEWMGWMNPNSGNSGSVKKFRDRVTMTRNTSISTAYMELSSLRSEDTAVYYCVRLIGYSSAWKWSFQHWGQGTLVTVSS

SEQ ID NO: 83 - DNA, 708 bp, Artificial Sequence
  Synthetic
atggacatgagggtgcccgctcagctcctggggctcctgctgctgtggctgagaggtgcgcgctgtgacatccagatgacccagtctccatcctccctgtctgcatctgtaggagacagagtcaccatcacttgccaggcgagtcaggacattaacaaccatttaaattggtatcagcagaaaccggggaaagcccctaagctcctgatctacggtgcatacactttggaaacaggggtcccatcaaggttcagtggaagtggctctgggacagattttactttcaccatcagcagcctgcagcctgaagatattgctacatattactgtcaacagtatgataagctcccgctcactttcggcggagggaccaaggtggagatcaaacgaacggtggctgcaccatctgtcttcatcttcccgccatctgatgagcagttgaaatctggaactgcctctgttgtgtgcctgctgaataacttctatcccagagaggccaaagtacagtggaaggtggataacgccctccaatcgggtaactcccaggagagtgtcacagagcaggacagcaaggacagcacctacagcctcagcagcaccctgacgctgagcaaagcagactacgagaaacacaaagtctacgcctgcgaagtcacccatcagggcctgagctcgcccgtcacaaagagcttcaacaggggagagtgt

SEQ ID NO: 84 - DNA, 1413 bp, Artificial Sequence
  Synthetic
atggacatgagggtgcccgctcagctcctggggctcctgctgctgtggctgagaggtgcgcgctgtcaggtgcaactggtgcagtctggggctgaggtgacgaagcctggggcctcagtgaaggtctcctgcaaggcttctggatacaccttcaccagatatgatatcaactgggtgcgacaggccactggacaagggcttgagtggatgggatggatgaaccctaacagtggtaattcaggctctgtacagaaattccggggcagagtcaccatgaccaggaacacctccataaccacagtctatatggaactgagcagcctgagatctgatgacacggccgtgtattactgtgcgagaggaggaattagcagcagctggcactgggcttttgatatctggggccaagggacaatggtcaccgtctcttcagccagcaccaaggggccatccgtcttccccctggcgccctgctccaggagcacctccgagagcacagccgccctgggctgcctggtcaaggactacttccccgaaccggtgacggtgtcgtggaactcaggcgccctgaccagcggcgtgcacaccttcccggctgtcctacagtcctcaggactctactccctcagcagcgtggtgaccgtgccctccagcagcttgggcacgaagacctacacctgcaacgtagatcacaagcccagcaacaccaaggtggacaagagagttgagtccaaatatggtcccccatgcccatcatgcccagcacctgagttcctggggggaccatcagtcttcctgttccccccaaaacccaaggacactctcatgatctcccggacccctgaggtcacgtgcgtggtggtggacgtgagccaggaagaccccgaggtccagttcaactggtacgtggatggcgtggaggtgcataatgccaagacaaagccgcgggaggagcagttcaacagcacgtaccgtgtggtcagcgtcctcaccgtcctgcaccaggactggctgaacggcaaggagtacaagtgcaaggtctccaacaaaggcctcccgtcctccatcgagaaaaccatctccaaagccaaagggcagccccgagagccacaggtgtacaccctgcccccatcccaggaggagatgaccaagaaccaggtcagcctgacctgcctggtcaaaggcttctaccccagcgacatcgccgtggagtgggagagcaatgggcagccggagaacaactacaagaccacgcctcccgtgctggactccgacggctccttcttcctctacagcaggctaaccgtggacaagagcaggtggcaggaggggaatgtcttctcatgctccgtgatgcatgaggctctgcacaaccactacacacagaagagcctctccctgtctctgggcaaa

SEQ ID NO: 85 - protein, 236 aa, Artificial Sequence
  Synthetic
MDMRVPAQLLGLLLLWLRGARCDIQMTQSPSSLSASVGDRVTITCQASQDINNHLNWYQQKPGKAPKLLIYGAYTLETGVPSRFSGSGSGTDFTFTISSLQPEDIATYYCQQYDKLPLTFGGGTKVEIKRTVAAPSVFIFPPSDEQLKSGTASVVCLLNNFYPREAKVQWKVDNALQSGNSQESVTEQDSKDSTYSLSSTLTLSKADYEKHKVYACEVTHQGLSSPVTKSFNRGEC

SEQ ID NO: 86 - protein, 471 aa, Artificial Sequence
  Synthetic
MDMRVPAQLLGLLLLWLRGARCQVQLVQSGAEVTKPGASVKVSCKASGYTFTRYDINWVRQATGQGLEWMGWMNPNSGNSGSVQKFRGRVTMTRNTSITTVYMELSSLRSDDTAVYYCARGGISSSWHWAFDIWGQGTMVTVSSASTKGPSVFPLAPCSRSTSESTAALGCLVKDYFPEPVTVSWNSGALTSGVHTFPAVLQSSGLYSLSSVVTVPSSSLGTKTYTCNVDHKPSNTKVDKRVESKYGPPCPSCPAPEFLGGPSVFLFPPKPKDTLMISRTPEVTCVVVDVSQEDPEVQFNWYVDGVEVHNAKTKPREEQFNSTYRVVSVLTVLHQDWLNGKEYKCKVSNKGLPSSIEKTISKAKGQPREPQVYTLPPSQEEMTKNQVSLTCLVKGFYPSDIAVEWESNGQPENNYKTTPPVLDSDGSFFLYSRLTVDKSRWQEGNVFSCSVMHEALHNHYTQKSLSLSLGK

SEQ ID NO: 87 - DNA, 33 bp, Artificial Sequence
  Synthetic
caggcgagtcaggacattaacaaccatttaaat

SEQ ID NO: 88 - DNA, 21 bp, Artificial Sequence
  Synthetic
ggtgcatacactttggaaaca

SEQ ID NO: 89 - DNA, 27 bp, Artificial Sequence
  Synthetic
caacagtatgataagctcccgctcact

SEQ ID NO: 90 - protein, 11 aa, Artificial Sequence
  Synthetic
QASQDINNHLN

SEQ ID NO: 91 - protein, 7 aa, Artificial Sequence
  Synthetic
GAYTLET

SEQ ID NO: 92 - protein, 9 aa, Artificial Sequence
  Synthetic
QQYDKLPLT

SEQ ID NO: 93 - DNA, 15 bp, Artificial Sequence
  Synthetic
agatatgatatcaac

SEQ ID NO: 94 - DNA, 51 bp, Artificial Sequence
  Synthetic
tggatgaaccctaacagtggtaattcaggctctgtacagaaattccggggc

SEQ ID NO: 95 - DNA, 39 bp, Artificial Sequence
  Synthetic
ggaggaattagcagcagctggcactgggcttttgatatc

SEQ ID NO: 96 - protein, 5 aa, Artificial Sequence
  Synthetic
RYDIN

SEQ ID NO: 97 - protein, 17 aa, Artificial Sequence
  Synthetic
WMNPNSGNSGSVQKFRG

SEQ ID NO: 98 - protein, 13 aa, Artificial Sequence
  Synthetic
GGISSSWHWAFDI

SEQ ID NO: 99 - DNA, 321 bp, Artificial Sequence
  Synthetic
gacatccagatgacccagtctccatcctccctgtctgcatctgtaggagacagagtcaccatcacttgccaggcgagtcaggacattaacaaccatttaaattggtatcagcagaaaccggggaaagcccctaagctcctgatctacggtgcatacactttggaaacaggggtcccatcaaggttcagtggaagtggctctgggacagattttactttcaccatcagcagcctgcagcctgaagatattgctacatattactgtcaacagtatgataagctcccgctcactttcggcggagggaccaaggtggagatcaaa

SEQ ID NO: 100 - DNA, 366 bp, Artificial Sequence
  Synthetic
caggtgcaactggtgcagtctggggctgaggtgacgaagcctggggcctcagtgaaggtctcctgcaaggcttctggatacaccttcaccagatatgatatcaactgggtgcgacaggccactggacaagggcttgagtggatgggatggatgaaccctaacagtggtaattcaggctctgtacagaaattccggggcagagtcaccatgaccaggaacacctccataaccacagtctatatggaactgagcagcctgagatctgatgacacggccgtgtattactgtgcgagaggaggaattagcagcagctggcactgggcttttgatatctggggccaagggacaatggtcaccgtctcttca

SEQ ID NO: 101 - protein, 107 aa, Artificial Sequence
  Synthetic
DIQMTQSPSSLSASVGDRVTITCQASQDINNHLNWYQQKPGKAPKLLIYGAYTLETGVPSRFSGSGSGTDFTFTISSLQPEDIATYYCQQYDKLPLTFGGGTKVEIK

SEQ ID NO: 102 - protein, 122 aa, Artificial Sequence
  Synthetic
QVQLVQSGAEVTKPGASVKVSCKASGYTFTRYDINWVRQATGQGLEWMGWMNPNSGNSGSVQKFRGRVTMTRNTSITTVYMELSSLRSDDTAVYYCARGGISSSWHWAFDIWGQGTMVTVSS

SEQ ID NO: 103 - DNA, 708 bp, Artificial Sequence
  Synthetic
atggacatgagggtgcccgctcagctcctggggctcctgctgctgtggctgagaggtgcgcgctgtgacatccagatgacccagtctccatcttccctgtctgcatctgtaggagacagagtcaccatcacttgccgggcaagtcagagcattagcagcaatttaaattggtatcagcagaaaccagggaaagcccctaagctcctgatctctgctgcatccaatttgcaaagtggggtcccatcaaggttcagtggcagtgaatctgggacagatttcactctcaccatcagcagtctacaatctgaagattttgcaacttactactgtcaacagagtgacagtctcccgctcactttcggcggagggaccaaggtggagatcaatcgaacggtggctgcaccatctgtcttcatcttcccgccatctgatgagcagttgaaatctggaactgcctctgttgtgtgcctgctgaataacttctatcccagagaggccaaagtacagtggaaggtggataacgccctccaatcgggtaactcccaggagagtgtcacagagcaggacagcaaggacagcacctacagcctcagcagcaccctgacgctgagcaaagcagactacgagaaacacaaagtctacgcctgcgaagtcacccatcagggcctgagctcgcccgtcacaaagagcttcaacaggggagagtgt

SEQ ID NO: 104 - DNA, 1404 bp, Artificial Sequence
  Synthetic
atggacatgagggtgcccgctcagctcctggggctcctgctgctgtggctgagaggtgcgcgctgtgaggtgcagctgttggagtctgggggaggcttggtacagcctggggggtccctgagactctcctgtgcagcctctggattcacctttagcagctatgccatgacctgggtccgccaggctccagggagggggctgcagtgggtctcaactattagtggtagtggtagtaacacatactacgcagactccgtgaagggccggttcaccatctccagagacaattccaagaacacgctgtatctgcaaatgagcagcctgagagccgaggacacggccgtatattactgtgcgaaagaggggggcagtaaccgatacttccaccactggggccagggcaccctggtcaccatctcctcagccagcaccaaggggccatccgtcttccccctggcgccctgctccaggagcacctccgagagcacagccgccctgggctgcctggtcaaggactacttccccgaaccggtgacggtgtcgtggaactcaggcgccctgaccagcggcgtgcacaccttcccggctgtcctacagtcctcaggactctactccctcagcagcgtggtgaccgtgccctccagcagcttgggcacgaagacctacacctgcaacgtagatcacaagcccagcaacaccaaggtggacaagagagttgagtccaaatatggtcccccatgcccatcatgcccagcacctgagttcctggggggaccatcagtcttcctgttccccccaaaacccaaggacactctcatgatctcccggacccctgaggtcacgtgcgtggtggtggacgtgagccaggaagaccccgaggtccagttcaactggtacgtggatggcgtggaggtgcataatgccaagacaaagccgcgggaggagcagttcaacagcacgtaccgtgtggtcagcgtcctcaccgtcctgcaccaggactggctgaacggcaaggagtacaagtgcaaggtctccaacaaaggcctcccgtcctccatcgagaaaaccatctccaaagccaaagggcagccccgagagccacaggtgtacaccctgcccccatcccaggaggagatgaccaagaaccaggtcagcctgacctgcctggtcaaaggcttctaccccagcgacatcgccgtggagtgggagagcaatgggcagccggagaacaactacaagaccacgcctcccgtgctggactccgacggctccttcttcctctacagcaggctaaccgtggacaagagcaggtggcaggaggggaatgtcttctcatgctccgtgatgcatgaggctctgcacaaccactacacacagaagagcctctccctgtctctgggcaaa

SEQ ID NO: 105 - protein, 236 aa, Artificial Sequence
  Synthetic
MDMRVPAQLLGLLLLWLRGARCDIQMTQSPSSLSASVGDRVTITCRASQSISSNLNWYQQKPGKAPKLLISAASNLQSGVPSRFSGSESGTDFTLTISSLQSEDFATYYCQQSDSLPLTFGGGTKVEINRTVAAPSVFIFPPSDEQLKSGTASVVCLLNNFYPREAKVQWKVDNALQSGNSQESVTEQDSKDSTYSLSSTLTLSKADYEKHKVYACEVTHQGLSSPVTKSFNRGEC

SEQ ID NO: 106 - protein, 468 aa, Artificial Sequence
  Synthetic
MDMRVPAQLLGLLLLWLRGARCEVQLLESGGGLVQPGGSLRLSCAASGFTFSSYAMTWVRQAPGRGLQWVSTISGSGSNTYYADSVKGRFTISRDNSKNTLYLQMSSLRAEDTAVYYCAKEGGSNRYFHHWGQGTLVTISSASTKGPSVFPLAPCSRSTSESTAALGCLVKDYFPEPVTVSWNSGALTSGVHTFPAVLQSSGLYSLSSVVTVPSSSLGTKTYTCNVDHKPSNTKVDKRVESKYGPPCPSCPAPEFLGGPSVFLFPPKPKDTLMISRTPEVTCVVVDVSQEDPEVQFNWYVDGVEVHNAKTKPREEQFNSTYRVVSVLTVLHQDWLNGKEYKCKVSNKGLPSSIEKTISKAKGQPREPQVYTLPPSQEEMTKNQVSLTCLVKGFYPSDIAVEWESNGQPENNYKTTPPVLDSDGSFFLYSRLTVDKSRWQEGNVFSCSVMHEALHNHYTQKSLSLSLGK

SEQ ID NO: 107 - DNA, 33 bp, Artificial Sequence
  Synthetic
cgggcaagtcagagcattagcagcaatttaaat

SEQ ID NO: 108 - DNA, 21 bp, Artificial Sequence
  Synthetic
gctgcatccaatttgcaaagt

SEQ ID NO: 109 - DNA, 27 bp, Artificial Sequence
  Synthetic
caacagagtgacagtctcccgctcact

SEQ ID NO: 110 - protein, 11 aa, Artificial Sequence
  Synthetic
RASQSISSNLN

SEQ ID NO: 111 - protein, 7 aa, Artificial Sequence
  Synthetic
AASNLQS

SEQ ID NO: 112 - protein, 9 aa, Artificial Sequence
  Synthetic
QQSDSLPLT

SEQ ID NO: 113 - DNA, 15 bp, Artificial Sequence
  Synthetic
agctatgccatgacc

SEQ ID NO: 114 - DNA, 51 bp, Artificial Sequence
  Synthetic
actattagtggtagtggtagtaacacatactacgcagactccgtgaagggc

SEQ ID NO: 115 - DNA, 30 bp, Artificial Sequence
  Synthetic
gaggggggcagtaaccgatacttccaccac

SEQ ID NO: 116 - protein, 5 aa, Artificial Sequence
  Synthetic
SYAMT

SEQ ID NO: 117 - protein, 17 aa, Artificial Sequence
  Synthetic
TISGSGSNTYYADSVKG

SEQ ID NO: 118 - protein, 10 aa, Artificial Sequence
  Synthetic
EGGSNRYFHH

SEQ ID NO: 119 - DNA, 321 bp, Artificial Sequence
  Synthetic
gacatccagatgacccagtctccatcttccctgtctgcatctgtaggagacagagtcaccatcacttgccgggcaagtcagagcattagcagcaatttaaattggtatcagcagaaaccagggaaagcccctaagctcctgatctctgctgcatccaatttgcaaagtggggtcccatcaaggttcagtggcagtgaatctgggacagatttcactctcaccatcagcagtctacaatctgaagattttgcaacttactactgtcaacagagtgacagtctcccgctcactttcggcggagggaccaaggtggagatcaat

SEQ ID NO: 120 - DNA, 357 bp, Artificial Sequence
  Synthetic
gaggtgcagctgttggagtctgggggaggcttggtacagcctggggggtccctgagactctcctgtgcagcctctggattcacctttagcagctatgccatgacctgggtccgccaggctccagggagggggctgcagtgggtctcaactattagtggtagtggtagtaacacatactacgcagactccgtgaagggccggttcaccatctccagagacaattccaagaacacgctgtatctgcaaatgagcagcctgagagccgaggacacggccgtatattactgtgcgaaagaggggggcagtaaccgatacttccaccactggggccagggcaccctggtcaccatctcctca

SEQ ID NO: 121 - protein, 107 aa, Artificial Sequence
  Synthetic
DIQMTQSPSSLSASVGDRVTITCRASQSISSNLNWYQQKPGKAPKLLISAASNLQSGVPSRFSGSESGTDFTLTISSLQSEDFATYYCQQSDSLPLTFGGGTKVEIN

SEQ ID NO: 122 - protein, 119 aa, Artificial Sequence
  Synthetic
EVQLLESGGGLVQPGGSLRLSCAASGFTFSSYAMTWVRQAPGRGLQWVSTISGSGSNTYYADSVKGRFTISRDNSKNTLYLQMSSLRAEDTAVYYCAKEGGSNRYFHHWGQGTLVTISS

SEQ ID NO: 123 - DNA, 708 bp, Artificial Sequence
  Synthetic
atggacatgagggtgcccgctcagctcctggggctcctgctgctgtggctgagaggtgcgcgctgtgacatccagatgacccagtctccatcctccctgtctgcatctgtaggagacagagtcaccatcacttgccaggcgagtcaggacattaacaaccatttaaattggtatcagcagaaaccagggaaagcccctaagctcctgatctacgatgtatccaatttggaaacaggggtcccatcaagtttcagtggaagtggatgtgggacagattttactttcaccatcagcagcctgcagcctgaagatatcgcaacatatttctgtcaacagtatgataaactcccgctcacttttggcggagggaccaaggtggagatcgaaggaacggtggctgcaccatctgtcttcatcttcccgccatctgatgagcagttgaaatctggaactgcctctgttgtgtgcctgctgaataacttctatcccagagaggccaaagtacagtggaaggtggataacgccctccaatcgggtaactcccaggagagtgtcacagagcaggacagcaaggacagcacctacagcctcagcagcaccctgacgctgagcaaagcagactacgagaaacacaaagtctacgcctgcgaagtcacccatcagggcctgagctcgcccgtcacaaagagcttcaacaggggagagtgt

SEQ ID NO: 124 - DNA, 1413 bp, Artificial Sequence
  Synthetic
atggacatgagggtgcccgctcagctcctggggctcctgctgctgtggctgagaggtgcgcgctgtcaggtgcagctggtgcagtctggggctgaggtgaagaagcctggggcctcagtgaaggtctcctgcaaggcttctggatacaccttcacccgttatgatatcaactgggtgcgacaggccactggacaagggcttgagtggatgggatggctgaaccctaatagtggtaacacaggccagacacagaagttccggggcagagtcaccatgaccaggaacacctccataaatacagcctacatggagctgagcagcctgagatctgaggacacggccgtgtattactgtgcgagaggggggtataccagtgcctggagatggtacttcgatctctggggccgtggcaccctggtcactgtctcctcagccagcaccaaggggccatccgtcttccccctggcgccctgctccaggagcacctccgagagcacagccgccctgggctgcctggtcaaggactacttccccgaaccggtgacggtgtcgtggaactcaggcgccctgaccagcggcgtgcacaccttcccggctgtcctacagtcctcaggactctactccctcagcagcgtggtgaccgtgccctccagcagcttgggcacgaagacctacacctgcaacgtagatcacaagcccagcaacaccaaggtggacaagagagttgagtccaaatatggtcccccatgcccatcatgcccagcacctgagttcctggggggaccatcagtcttcctgttccccccaaaacccaaggacactctcatgatctcccggacccctgaggtcacgtgcgtggtggtggacgtgagccaggaagaccccgaggtccagttcaactggtacgtggatggcgtggaggtgcataatgccaagacaaagccgcgggaggagcagttcaacagcacgtaccgtgtggtcagcgtcctcaccgtcctgcaccaggactggctgaacggcaaggagtacaagtgcaaggtctccaacaaaggcctcccgtcctccatcgagaaaaccatctccaaagccaaagggcagccccgagagccacaggtgtacaccctgcccccatcccaggaggagatgaccaagaaccaggtcagcctgacctgcctggtcaaaggcttctaccccagcgacatcgccgtggagtgggagagcaatgggcagccggagaacaactacaagaccacgcctcccgtgctggactccgacggctccttcttcctctacagcaggctaaccgtggacaagagcaggtggcaggaggggaatgtcttctcatgctccgtgatgcatgaggctctgcacaaccactacacacagaagagcctctccctgtctctgggcaaa

SEQ ID NO: 125 - protein, 236 aa, Artificial Sequence
  Synthetic
MDMRVPAQLLGLLLLWLRGARCDIQMTQSPSSLSASVGDRVTITCQASQDINNHLNWYQQKPGKAPKLLIYDVSNLETGVPSSFSGSGCGTDFTFTISSLQPEDIATYFCQQYDKLPLTFGGGTKVEIEGTVAAPSVFIFPPSDEQLKSGTASVVCLLNNFYPREAKVQWKVDNALQSGNSQESVTEQDSKDSTYSLSSTLTLSKADYEKHKVYACEVTHQGLSSPVTKSFNRGEC

SEQ ID NO: 126 - protein, 471 aa, Artificial Sequence
  Synthetic
MDMRVPAQLLGLLLLWLRGARCQVQLVQSGAEVKKPGASVKVSCKASGYTFTRYDINWVRQATGQGLEWMGWLNPNSGNTGQTQKFRGRVTMTRNTSINTAYMELSSLRSEDTAVYYCARGGYTSAWRWYFDLWGRGTLVTVSSASTKGPSVFPLAPCSRSTSESTAALGCLVKDYFPEPVTVSWNSGALTSGVHTFPAVLQSSGLYSLSSVVTVPSSSLGTKTYTCNVDHKPSNTKVDKRVESKYGPPCPSCPAPEFLGGPSVFLFPPKPKDTLMISRTPEVTCVVVDVSQEDPEVQFNWYVDGVEVHNAKTKPREEQFNSTYRVVSVLTVLHQDWLNGKEYKCKVSNKGLPSSIEKTISKAKGQPREPQVYTLPPSQEEMTKNQVSLTCLVKGFYPSDIAVEWESNGQPENNYKTTPPVLDSDGSFFLYSRLTVDKSRWQEGNVFSCSVMHEALHNHYTQKSLSLSLGK

SEQ ID NO: 127 - DNA, 33 bp, Artificial Sequence; identical to SEQ ID NO: 87
  Synthetic

SEQ ID NO: 128 - DNA, 21 bp, Artificial Sequence
  Synthetic
gatgtatccaatttggaaaca

SEQ ID NO: 129 - DNA, 27 bp, Artificial Sequence
  Synthetic
caacagtatgataaactcccgctcact

SEQ ID NO: 130 - protein, 11 aa, Artificial Sequence
  Synthetic
QASQDINNHLN

SEQ ID NO: 131 - protein, 7 aa, Artificial Sequence
  Synthetic
DVSNLET

SEQ ID NO: 132 - protein, 9 aa, Artificial Sequence
  Synthetic
QQYDKLPLT

SEQ ID NO: 133 - DNA, 15 bp, Artificial Sequence
  Synthetic
cgttatgatatcaac

SEQ ID NO: 134 - DNA, 51 bp, Artificial Sequence
  Synthetic
tggctgaaccctaatagtggtaacacaggccagacacagaagttccggggc

SEQ ID NO: 135 - DNA, 39 bp, Artificial Sequence
  Synthetic
ggggggtataccagtgcctggagatggtacttcgatctc

SEQ ID NO: 136 - protein, 5 aa, Artificial Sequence
  Synthetic
RYDIN

SEQ ID NO: 137 - protein, 17 aa, Artificial Sequence
  Synthetic
WLNPNSGNTGQTQKFRG

SEQ ID NO: 138 - protein, 13 aa, Artificial Sequence
  Synthetic
GGYTSAWRWYFDL

SEQ ID NO: 139 - DNA, 321 bp, Artificial Sequence
  Synthetic
gacatccagatgacccagtctccatcctccctgtctgcatctgtaggagacagagtcaccatcacttgccaggcgagtcaggacattaacaaccatttaaattggtatcagcagaaaccagggaaagcccctaagctcctgatctacgatgtatccaatttggaaacaggggtcccatcaagtttcagtggaagtggatgtgggacagattttactttcaccatcagcagcctgcagcctgaagatatcgcaacatatttctgtcaacagtatgataaactcccgctcacttttggcggagggaccaaggtggagatcgaa

SEQ ID NO: 140 - DNA, 366 bp, Artificial Sequence
  Synthetic
caggtgcagctggtgcagtctggggctgaggtgaagaagcctggggcctcagtgaaggtctcctgcaaggcttctggatacaccttcacccgttatgatatcaactgggtgcgacaggccactggacaagggcttgagtggatgggatggctgaaccctaatagtggtaacacaggccagacacagaagttccggggcagagtcaccatgaccaggaacacctccataaatacagcctacatggagctgagcagcctgagatctgaggacacggccgtgtattactgtgcgagaggggggtataccagtgcctggagatggtacttcgatctctggggccgtggcaccctggtcactgtctcctca

SEQ ID NO: 141 - protein, 107 aa, Artificial Sequence
  Synthetic
DIQMTQSPSSLSASVGDRVTITCQASQDINNHLNWYQQKPGKAPKLLIYDVSNLETGVPSSFSGSGCGTDFTFTISSLQPEDIATYFCQQYDKLPLTFGGGTKVEIE

SEQ ID NO: 142 - protein, 122 aa, Artificial Sequence
  Synthetic
QVQLVQSGAEVKKPGASVKVSCKASGYTFTRYDINWVRQATGQGLEWMGWLNPNSGNTGQTQKFRGRVTMTRNTSINTAYMELSSLRSEDTAVYYCARGGYTSAWRWYFDLWGRGTLVTVSS

SEQ ID NO: 143 - DNA, 708 bp, Artificial Sequence
  Synthetic
atggacatgagggtgcccgctcagctcctggggctcctgctgctgtggctgagaggtgcgcgctgtgacatccagatgacccagtctccatcttccgtgtctgcatctgtaggagacagagtcaccatcacttgtcgggcgagtcagggtattcgcaagtggttagcctggtatcagcagaaaccagggagggcccctaagctcctgatctatgctgcatcccgtttgcaaagtggggtcccatcaaggttcagcggcagtggatctgggacagatttcactctcaccatcagcagcctgcggcctgaagattttgcaacttactattgtcttcaggctcacggtttcccgtggacgttcggccaagggaccaaggtggaaatcaaacgaacggtggctgcaccatctgtcttcatcttcccgccatctgatgagcagttgaaatctggaactgcctctgttgtgtgcctgctgaataacttctatcccagagaggccaaagtacagtggaaggtggataacgccctccaatcgggtaactcccaggagagtgtcacagagcaggacagcaaggacagcacctacagcctcagcagcaccctgacgctgagcaaagcagactacgagaaacacaaagtctacgcctgcgaagtcacccatcagggcctgagctcgcccgtcacaaagagcttcaacaggggagagtgt

SEQ ID NO: 144 - DNA, 1395 bp, Artificial Sequence
  Synthetic
atggacatgagggtgcccgctcagctcctggggctcctgctgctgtggctgagaggtgcgcgctgtgaggtgcagctggtggagtctgggggaggcttggtccagccgggggggtccctgagactctcctgtgcagcctctggattcacctttagtagctattggatgagctgggtccgccaggctccagggaaggggctggagtgggtggccaacataaagcaagatggaagtgaggaatattatgtggactctgtgaagggccgattcaccatctccagagacaacgccaagaactcactgtttctgcaaatgaacagcctgagagccgaggacacggctgtgtattactgtgcgagagactacggtgactcctttgactactggggccagggaaccctggtcaccgtctcctcagcctccaccaagggcccatcggtcttccccctggcgccctgctccaggagcacctccgagagcacagcggccctgggctgcctggtcaaggactacttccccgaaccggtgacggtgtcgtggaactcaggcgctctgaccagcggcgtgcacaccttcccagctgtcctacagtcctcaggactctactccctcagcagcgtggtgaccgtgccctccagcaacttcggcacccagacctacacctgcaacgtagatcacaagcccagcaacaccaaggtggacaagacagttgagcgcaaatgttgtgtcgagtgcccaccgtgcccagcaccacctgtggcaggaccgtcagtcttcctcttccccccaaaacccaaggacaccctcatgatctcccggacccctgaggtcacgtgcgtggtggtggacgtgagccacgaagaccccgaggtccagttcaactggtacgtggacggcgtggaggtgcataatgccaagacaaagccacgggaggagcagttcaacagcacgttccgtgtggtcagcgtcctcaccgttgtgcaccaggactggctgaacggcaaggagtacaagtgcaaggtctccaacaaaggcctcccagcccccatcgagaaaaccatctccaaaaccaaagggcagccccgagaaccacaggtgtacaccctgcccccatcccgggaggagatgaccaagaaccaggtcagcctgacctgcctggtcaaaggcttctaccccagcgacatcgccgtggagtgggagagcaatgggcagccggagaacaactacaagaccacacctcccatgctggactccgacggctccttcttcctctacagcaagctcaccgtggacaagagcaggtggcagcaggggaacgtcttctcatgctccgtgatgcatgaggctctgcacaaccactacacgcagaagagcctctccctgtctccgggcaaa

SEQ ID NO: 145 - protein, 236 aa, Artificial Sequence
  Synthetic
MDMRVPAQLLGLLLLWLRGARCDIQMTQSPSSVSASVGDRVTITCRASQGIRKWLAWYQQKPGRAPKLLIYAASRLQSGVPSRFSGSGSGTDFTLTISSLRPEDFATYYCLQAHGFPWTFGQGTKVEIKRTVAAPSVFIFPPSDEQLKSGTASVVCLLNNFYPREAKVQWKVDNALQSGNSQESVTEQDSKDSTYSLSSTLTLSKADYEKHKVYACEVTHQGLSSPVTKSFNRGEC

SEQ ID NO: 146 - protein, 465 aa, Artificial Sequence
  Synthetic
MDMRVPAQLLGLLLLWLRGARCEVQLVESGGGLVQPGGSLRLSCAASGFTFSSYWMSWVRQAPGKGLEWVANIKQDGSEEYYVDSVKGRFTISRDNAKNSLFLQMNSLRAEDTAVYYCARDYGDSFDYWGQGTLVTVSSASTKGPSVFPLAPCSRSTSESTAALGCLVKDYFPEPVTVSWNSGALTSGVHTFPAVLQSSGLYSLSSVVTVPSSNFGTQTYTCNVDHKPSNTKVDKTVERKCCVECPPCPAPPVAGPSVFLFPPKPKDTLMISRTPEVTCVVVDVSHEDPEVQFNWYVDGVEVHNAKTKPREEQFNSTFRVVSVLTVVHQDWLNGKEYKCKVSNKGLPAPIEKTISKTKGQPREPQVYTLPPSREEMTKNQVSLTCLVKGFYPSDIAVEWESNGQPENNYKTTPPMLDSDGSFFLYSKLTVDKSRWQQGNVFSCSVMHEALHNHYTQKSLSLSPGK

SEQ ID NO: 147 - DNA, 33 bp, Artificial Sequence
  Synthetic
cgggcgagtcagggtattcgcaagtggttagcc

SEQ ID NO: 148 - DNA, 21 bp, Artificial Sequence
  Synthetic
gctgcatcccgtttgcaaagt

SEQ ID NO: 149 - DNA, 27 bp, Artificial Sequence
  Synthetic
cttcaggctcacggtttcccgtggacg

SEQ ID NO: 150 - protein, 11 aa, Artificial Sequence
  Synthetic
RASQGIRKWLA

SEQ ID NO: 151 - protein, 7 aa, Artificial Sequence
  Synthetic
AASRLQS

SEQ ID NO: 152 - protein, 9 aa, Artificial Sequence
  Synthetic
LQAHGFPWT

SEQ ID NO: 153 - DNA, 15 bp, Artificial Sequence
  Synthetic
agctattggatgagc

SEQ ID NO: 154 - DNA, 51 bp, Artificial Sequence
  Synthetic
aacataaagcaagatggaagtgaggaatattatgtggactctgtgaagggc

SEQ ID NO: 155 - DNA, 24 bp, Artificial Sequence
  Synthetic
gactacggtgactcctttgactac

SEQ ID NO: 156 - protein, 5 aa, Artificial Sequence
  Synthetic
SYWMS

SEQ ID NO: 157 - protein, 17 aa, Artificial Sequence
  Synthetic
NIKQDGSEEYYVDSVKG

SEQ ID NO: 158 - protein, 8 aa, Artificial Sequence
  Synthetic
DYGDSFDY

SEQ ID NO: 159 - DNA, 321 bp, Artificial Sequence
  Synthetic
gacatccagatgacccagtctccatcttccgtgtctgcatctgtaggagacagagtcaccatcacttgtcgggcgagtcagggtattcgcaagtggttagcctggtatcagcagaaaccagggagggcccctaagctcctgatctatgctgcatcccgtttgcaaagtggggtcccatcaaggttcagcggcagtggatctgggacagatttcactctcaccatcagcagcctgcggcctgaagattttgcaacttactattgtcttcaggctcacggtttcccgtggacgttcggccaagggaccaaggtggaaatcaaa

SEQ ID NO: 160 - DNA, 351 bp, Artificial Sequence
  Synthetic
gaggtgcagctggtggagtctgggggaggcttggtccagccgggggggtccctgagactctcctgtgcagcctctggattcacctttagtagctattggatgagctgggtccgccaggctccagggaaggggctggagtgggtggccaacataaagcaagatggaagtgaggaatattatgtggactctgtgaagggccgattcaccatctccagagacaacgccaagaactcactgtttctgcaaatgaacagcctgagagccgaggacacggctgtgtattactgtgcgagagactacggtgactcctttgactactggggccagggaaccctggtcaccgtctcctca

SEQ ID NO: 161 - protein, 107 aa, Artificial Sequence
  Synthetic
DIQMTQSPSSVSASVGDRVTITCRASQGIRKWLAWYQQKPGRAPKLLIYAASRLQSGVPSRFSGSGSGTDFTLTISSLRPEDFATYYCLQAHGFPWTFGQGTKVEIK

SEQ ID NO: 162 - protein, 117 aa, Artificial Sequence
  Synthetic
EVQLVESGGGLVQPGGSLRLSCAASGFTFSSYWMSWVRQAPGKGLEWVANIKQDGSEEYYVDSVKGRFTISRDNAKNSLFLQMNSLRAEDTAVYYCARDYGDSFDYWGQGTLVTVSS

SEQ ID NO: 163 - DNA, 708 bp, Artificial Sequence
  Synthetic
atggacatgagggtgcccgctcagctcctggggctcctgctgctgtggctgagaggtgcgcgctgtgaaatagtgatgacgcagtctccagccaccctgtctgtgtctccaggggaaagagccaccctctcctgcagggccagtcagagtgttagcagcaacttagcctggtatcagcagaaatctggccaggctcccaggctcctcatctatggtgcatccatcagggccactggtatcccagccagggtcagcggcagtgggtctgggacagagttcaccttcactatcagcagcctgcagtctgaagattttgcagtctattactgtcagcagtataagaactggcctctcactctcggcggagggaccaaggtggagatcaaacgaacggtggctgcaccatctgtcttcatcttcccgccatctgatgagcagttgaaatctggaactgcctctgttgtgtgcctgctgaataacttctatcccagagaggccaaagtacagtggaaggtggataacgccctccaatcgggtaactcccaggagagtgtcacagagcaggacagcaaggacagcacctacagcctcagcagcaccctgacgctgagcaaagcagactacgagaaacacaaagtctacgcctgcgaagtcacccatcagggcctgagctcgcccgtcacaaagagcttcaacaggggagagtgt

SEQ ID NO: 164 - DNA, 1392 bp, Artificial Sequence
  Synthetic
atggacatgagggtgcccgctcagctcctggggctcctgctgctgtggctgagaggtgcgcgctgtgaggtgcagctggtggagtctgggggaggcttggtccagcctggggggtccctgagactctcctgtgcagcctctggattcacctttagcagcaattggatgagctgggtccgccaggctccagggaaggggctggactggatggccagcatgaagcaagatggaagtgagatatactatgtggactctgtgaagggccgattcaccatctccagagacaacgccaagaactcactgcatctgcaaatgaacagcctgagagccgaggacacggctgtgtattactgtgtgagaggagggtggagatttgagtcctggggccagggagccctggtcaccgtctcctcagcctccaccaagggcccatcggtcttccccctggcgccctgctccaggagcacctccgagagcacagcggccctgggctgcctggtcaaggactacttccccgaaccggtgacggtgtcgtggaactcaggcgctctgaccagcggcgtgcacaccttcccagctgtcctacagtcctcaggactctactccctcagcagcgtggtgaccgtgccctccagcaacttcggcacccagacctacacctgcaacgtagatcacaagcccagcaacaccaaggtggacaagacagttgagcgcaaatgttgtgtcgagtgcccaccgtgcccagcaccacctgtggcaggaccgtcagtcttcctcttccccccaaaacccaaggacaccctcatgatctcccggacccctgaggtcacgtgcgtggtggtggacgtgagccacgaagaccccgaggtccagttcaactggtacgtggacggcgtggaggtgcataatgccaagacaaagccacgggaggagcagttcaacagcacgttccgtgtggtcagcgtcctcaccgttgtgcaccaggactggctgaacggcaaggagtacaagtgcaaggtctccaacaaaggcctcccagcccccatcgagaaaaccatctccaaaaccaaagggcagccccgagaaccacaggtgtacaccctgcccccatcccgggaggagatgaccaagaaccaggtcagcctgacctgcctggtcaaaggcttctaccccagcgacatcgccgtggagtgggagagcaatgggcagccggagaacaactacaagaccacacctcccatgctggactccgacggctccttcttcctctacagcaagctcaccgtggacaagagcaggtggcagcaggggaacgtcttctcatgctccgtgatgcatgaggctctgcacaaccactacacgcagaagagcctctccctgtctccgggcaaa

SEQ ID NO: 165 - protein, 236 aa, Artificial Sequence
  Synthetic
MDMRVPAQLLGLLLLWLRGARCEIVMTQSPATLSVSPGERATLSCRASQSVSSNLAWYQQKSGQAPRLLIYGASIRATGIPARVSGSGSGTEFTFTISSLQSEDFAVYYCQQYKNWPLTLGGGTKVEIKRTVAAPSVFIFPPSDEQLKSGTASVVCLLNNFYPREAKVQWKVDNALQSGNSQESVTEQDSKDSTYSLSSTLTLSKADYEKHKVYACEVTHQGLSSPVTKSFNRGEC

SEQ ID NO: 166 - protein, 464 aa, Artificial Sequence
  Synthetic
MDMRVPAQLLGLLLLWLRGARCEVQLVESGGGLVQPGGSLRLSCAASGFTFSSNWMSWVRQAPGKGLDWMASMKQDGSEIYYVDSVKGRFTISRDNAKNSLHLQMNSLRAEDTAVYYCVRGGWRFESWGQGALVTVSSASTKGPSVFPLAPCSRSTSESTAALGCLVKDYFPEPVTVSWNSGALTSGVHTFPAVLQSSGLYSLSSVVTVPSSNFGTQTYTCNVDHKPSNTKVDKTVERKCCVECPPCPAPPVAGPSVFLFPPKPKDTLMISRTPEVTCVVVDVSHEDPEVQFNWYVDGVEVHNAKTKPREEQFNSTFRVVSVLTVVHQDWLNGKEYKCKVSNKGLPAPIEKTISKTKGQPREPQVYTLPPSREEMTKNQVSLTCLVKGFYPSDIAVEWESNGQPENNYKTTPPMLDSDGSFFLYSKLTVDKSRWQQGNVFSCSVMHEALHNHYTQKSLSLSPGK

SEQ ID NO: 167 - DNA, 33 bp, Artificial Sequence
  Synthetic
agggccagtcagagtgttagcagcaacttagcc

SEQ ID NO: 168 - DNA, 21 bp, Artificial Sequence
  Synthetic
ggtgcatccatcagggccact

SEQ ID NO: 169 - DNA, 27 bp, Artificial Sequence
  Synthetic
cagcagtataagaactggcctctcact

SEQ ID NO: 170 - protein, 11 aa, Artificial Sequence
  Synthetic
RASQSVSSNLA

SEQ ID NO: 171 - protein, 7 aa, Artificial Sequence
  Synthetic
GASIRAT

SEQ ID NO: 172 - protein, 9 aa, Artificial Sequence
  Synthetic
QQYKNWPLT

SEQ ID NO: 173 - DNA, 15 bp, Artificial Sequence
  Synthetic
agcaattggatgagc

SEQ ID NO: 174 - DNA, 51 bp, Artificial Sequence
  Synthetic
agcatgaagcaagatggaagtgagatatactatgtggactctgtgaagggc

SEQ ID NO: 175 - DNA, 21 bp, Artificial Sequence
  Synthetic
ggagggtggagatttgagtcc

SEQ ID NO: 176 - protein, 5 aa, Artificial Sequence
  Synthetic
SNWMS

SEQ ID NO: 177 - protein, 17 aa, Artificial Sequence
  Synthetic
SMKQDGSEIYYVDSVKG

SEQ ID NO: 178 - protein, 7 aa, Artificial Sequence
  Synthetic
GGWRFES

SEQ ID NO: 179 - DNA, 321 bp, Artificial Sequence
  Synthetic
gaaatagtgatgacgcagtctccagccaccctgtctgtgtctccaggggaaagagccaccctctcctgcagggccagtcagagtgttagcagcaacttagcctggtatcagcagaaatctggccaggctcccaggctcctcatctatggtgcatccatcagggccactggtatcccagccagggtcagcggcagtgggtctgggacagagttcaccttcactatcagcagcctgcagtctgaagattttgcagtctattactgtcagcagtataagaactggcctctcactctcggcggagggaccaaggtggagatcaaa

SEQ ID NO: 180 - DNA, 348 bp, Artificial Sequence
  Synthetic
gaggtgcagctggtggagtctgggggaggcttggtccagcctggggggtccctgagactctcctgtgcagcctctggattcacctttagcagcaattggatgagctgggtccgccaggctccagggaaggggctggactggatggccagcatgaagcaagatggaagtgagatatactatgtggactctgtgaagggccgattcaccatctccagagacaacgccaagaactcactgcatctgcaaatgaacagcctgagagccgaggacacggctgtgtattactgtgtgagaggagggtggagatttgagtcctggggccagggagccctggtcaccgtctcctca

SEQ ID NO: 181 - protein, 107 aa, Artificial Sequence
  Synthetic
EIVMTQSPATLSVSPGERATLSCRASQSVSSNLAWYQQKSGQAPRLLIYGASIRATGIPARVSGSGSGTEFTFTISSLQSEDFAVYYCQQYKNWPLTLGGGTKVEIK

SEQ ID NO: 182 - protein, 116 aa, Artificial Sequence
  Synthetic
EVQLVESGGGLVQPGGSLRLSCAASGFTFSSNWMSWVRQAPGKGLDWMASMKQDGSEIYYVDSVKGRFTISRDNAKNSLHLQMNSLRAEDTAVYYCVRGGWRFESWGQGALVTVSS

SEQ ID NO: 183 - DNA, 711 bp, Artificial Sequence
  Synthetic
atggacatgagggtgcccgctcagctcctggggctcctgctgctgtggctgagaggtgcgcgctgtgaaatagtgatgacgcagtctccagccaccctgtctgtgtctccaggggaaagagccaccctctcctgcagggccagtcagagtgttaacagcaacttagcctggtaccagcagaaacctggccgggctcccaggctcctcatctatggtgcatccaccagggccactggtatcccagccaggttcagtggcagtgggtctgggacagagttcactctcaccatcagcagcctgcagtctgaagattttgcagtttattactgtcagcagttttataactggcctccgtggacgttcggccaggggaccaaggtggaaatcaaacgaacggtggctgcaccatctgtcttcatcttcccgccatctgatgagcagttgaaatctggaactgcctctgttgtgtgcctgctgaataacttctatcccagagaggccaaagtacagtggaaggtggataacgccctccaatcgggtaactcccaggagagtgtcacagagcaggacagcaaggacagcacctacagcctcagcagcaccctgacgctgagcaaagcagactacgagaaacacaaagtctacgcctgcgaagtcacccatcagggcctgagctcgcccgtcacaaagagcttcaacaggggagagtgt

SEQ ID NO: 184 - DNA, 1401 bp, Artificial Sequence
  Synthetic
atggacatgagggtgcccgctcagctcctggggctcctgctgctgtggctgagaggtgcgcgctgtgaggtgcagctgttggagtctgggggaggcatggtacagccgggggggtccctgagactctcctgtgcagtctctggattcacctttagtcgctatgccatgagctgggtccgccaggctccagggaaggggctggagtgggtctcagaaatgaggggtagtagtggtagcacatactacgcagactccgtgaagggccggttcaccatctccagagacaattccaagaacacgctgtatctgcaaatgaacagcctgagagtcgaggacacggccatatattactgtgcgaaagaatttagcagcaactccctctttgactactggggccagggaaccctggtcaccgtctcctcagcctccaccaagggcccatcggtcttccccctggcgccctgctccaggagcacctccgagagcacagcggccctgggctgcctggtcaaggactacttccccgaaccggtgacggtgtcgtggaactcaggcgctctgaccagcggcgtgcacaccttcccagctgtcctacagtcctcaggactctactccctcagcagcgtggtgaccgtgccctccagcaacttcggcacccagacctacacctgcaacgtagatcacaagcccagcaacaccaaggtggacaagacagttgagcgcaaatgttgtgtcgagtgcccaccgtgcccagcaccacctgtggcaggaccgtcagtcttcctcttccccccaaaacccaaggacaccctcatgatctcccggacccctgaggtcacgtgcgtggtggtggacgtgagccacgaagaccccgaggtccagttcaactggtacgtggacggcgtggaggtgcataatgccaagacaaagccacgggaggagcagttcaacagcacgttccgtgtggtcagcgtcctcaccgttgtgcaccaggactggctgaacggcaaggagtacaagtgcaaggtctccaacaaaggcctcccagcccccatcgagaaaaccatctccaaaaccaaagggcagccccgagaaccacaggtgtacaccctgcccccatcccgggaggagatgaccaagaaccaggtcagcctgacctgcctggtcaaaggcttctaccccagcgacatcgccgtggagtgggagagcaatgggcagccggagaacaactacaagaccacacctcccatgctggactccgacggctccttcttcctctacagcaagctcaccgtggacaagagcaggtggcagcaggggaacgtcttctcatgctccgtgatgcatgaggctctgcacaaccactacacgcagaagagcctctccctgtctccgggcaaa

SEQ ID NO: 185 - protein, 237 aa, Artificial Sequence
  Synthetic
MDMRVPAQLLGLLLLWLRGARCEIVMTQSPATLSVSPGERATLSCRASQSVNSNLAWYQQKPGRAPRLLIYGASTRATGIPARFSGSGSGTEFTLTISSLQSEDFAVYYCQQFYNWPPWTFGQGTKVEIKRTVAAPSVFIFPPSDEQLKSGTASVVCLLNNFYPREAKVQWKVDNALQSGNSQESVTEQDSKDSTYSLSSTLTLSKADYEKHKVYACEVTHQGLSSPVTKSFNRGEC

SEQ ID NO: 186 - protein, 467 aa, Artificial Sequence
  Synthetic
MDMRVPAQLLGLLLLWLRGARCEVQLLESGGGMVQPGGSLRLSCAVSGFTFSRYAMSWVRQAPGKGLEWVSEMRGSSGSTYYADSVKGRFTISRDNSKNTLYLQMNSLRVEDTAIYYCAKEFSSNSLFDYWGQGTLVTVSSASTKGPSVFPLAPCSRSTSESTAALGCLVKDYFPEPVTVSWNSGALTSGVHTFPAVLQSSGLYSLSSVVTVPSSNFGTQTYTCNVDHKPSNTKVDKTVERKCCVECPPCPAPPVAGPSVFLFPPKPKDTLMISRTPEVTCVVVDVSHEDPEVQFNWYVDGVEVHNAKTKPREEQFNSTFRVVSVLTVVHQDWLNGKEYKCKVSNKGLPAPIEKTISKTKGQPREPQVYTLPPSREEMTKNQVSLTCLVKGFYPSDIAVEWESNGQPENNYKTTPPMLDSDGSFFLYSKLTVDKSRWQQGNVFSCSVMHEALHNHYTQKSLSLSPGK

SEQ ID NO: 187 - DNA, 33 bp, Artificial Sequence
  Synthetic
agggccagtcagagtgttaacagcaacttagcc

SEQ ID NO: 188 - DNA, 21 bp, Artificial Sequence
  Synthetic
ggtgcatccaccagggccact

SEQ ID NO: 189 - DNA, 30 bp, Artificial Sequence
  Synthetic
cagcagttttataactggcctccgtggacg

SEQ ID NO: 190 - protein, 11 aa, Artificial Sequence
  Synthetic
RASQSVNSNLA

SEQ ID NO: 191 - protein, 7 aa, Artificial Sequence
  Synthetic
GASTRAT

SEQ ID NO: 192 - protein, 10 aa, Artificial Sequence
  Synthetic
QQFYNWPPWT

SEQ ID NO: 193 - DNA, 15 bp, Artificial Sequence
  Synthetic
cgctatgccatgagc

SEQ ID NO: 194 - DNA, 51 bp, Artificial Sequence
  Synthetic
gaaatgaggggtagtagtggtagcacatactacgcagactccgtgaagggc

SEQ ID NO: 195 - DNA, 30 bp, Artificial Sequence
  Synthetic
gaatttagcagcaactccctctttgactac

SEQ ID NO: 196 - protein, 5 aa, Artificial Sequence
  Synthetic
RYAMS

SEQ ID NO: 197 - protein, 17 aa, Artificial Sequence
  Synthetic
EMRGSSGSTYYADSVKG

SEQ ID NO: 198 - protein, 10 aa, Artificial Sequence
  Synthetic
EFSSNSLFDY

SEQ ID NO: 199 - DNA, 324 bp, Artificial Sequence
  Synthetic
gaaatagtgatgacgcagtctccagccaccctgtctgtgtctccaggggaaagagccaccctctcctgcagggccagtcagagtgttaacagcaacttagcctggtaccagcagaaacctggccgggctcccaggctcctcatctatggtgcatccaccagggccactggtatcccagccaggttcagtggcagtgggtctgggacagagttcactctcaccatcagcagcctgcagtctgaagattttgcagtttattactgtcagcagttttataactggcctccgtggacgttcggccaggggaccaaggtggaaatcaaa

SEQ ID NO: 200 - DNA, 357 bp, Artificial Sequence
  Synthetic
gaggtgcagctgttggagtctgggggaggcatggtacagccgggggggtccctgagactctcctgtgcagtctctggattcacctttagtcgctatgccatgagctgggtccgccaggctccagggaaggggctggagtgggtctcagaaatgaggggtagtagtggtagcacatactacgcagactccgtgaagggccggttcaccatctccagagacaattccaagaacacgctgtatctgcaaatgaacagcctgagagtcgaggacacggccatatattactgtgcgaaagaatttagcagcaactccctctttgactactggggccagggaaccctggtcaccgtctcctca

SEQ ID NO: 201 - protein, 108 aa, Artificial Sequence
  Synthetic
EIVMTQSPATLSVSPGERATLSCRASQSVNSNLAWYQQKPGRAPRLLIYGASTRATGIPARFSGSGSGTEFTLTISSLQSEDFAVYYCQQFYNWPPWTFGQGTKVEIK

SEQ ID NO: 202 - protein, 119 aa, Artificial Sequence
  Synthetic
EVQLLESGGGMVQPGGSLRLSCAVSGFTFSRYAMSWVRQAPGKGLEWVSEMRGSSGSTYYADSVKGRFTISRDNSKNTLYLQMNSLRVEDTAIYYCAKEFSSNSLFDYWGQGTLVTVSS

SEQ ID NO: 203 - DNA, 711 bp, Artificial Sequence
  Synthetic
atggacatgagggtgcccgctcagctcctggggctcctgctgctgtggctgagaggtgcgcgctgtgaaatagtgatgacgcagtctccagccatcctgtctgtgtctccaggggaaagagccaccctctcctgcagggccagtcagagtgttagcagcaacttagcctggtaccagcagaaacctggccaggctcccaggctcctcatctatggtgcatccaccagggccacgggtgtcccagccaggttcagtggcggtgggtctgggacagacttcactctcaccatcagcagcctgcagtctgaagattttgcagtttattactgtcagcactgtaagacctggcctccgctcactttcggcggagggaccaaggtggacctcaaacgaacggtggctgcaccatctgtcttcatcttcccgccatctgatgagcagttgaaatctggaactgcctctgttgtgtgcctgctgaataacttctatcccagagaggccaaagtacagtggaaggtggataacgccctccaatcgggtaactcccaggagagtgtcacagagcaggacagcaaggacagcacctacagcctcagcagcaccctgacgctgagcaaagcagactacgagaaacacaaagtctacgcctgcgaagtcacccatcagggcctgagctcgcccgtcacaaagagcttcaacaggggagagtgt

SEQ ID NO: 204 - DNA, 1401 bp, Artificial Sequence
  Synthetic
atggacatgagggtgcccgctcagctcctggggctcctgctgctgtggctgagaggtgcgcgctgtgaggtgcagctgttggagtctgggggaggcttggtacagcctggggggtccctgagactctcctgtgcagcctctggattcacctttagcacctatgccatgaactgggtccgccaggctccagggaaggggctggagtgggtctcaactgttagtggtagtggtcgtcccacatactacgcagactccgtgaagggccggttcaccatctccagagacaattccaagaacacgctgtatctgcaaatgaacagcctgagagccgaggacacggccgtttattactgtgcgaaggcctactacagtaactacctttttgactactggggccagggaaccctggtcaccgtctcctcagcctccaccaagggcccatcggtcttccccctggcgccctgctccaggagcacctccgagagcacagcggccctgggctgcctggtcaaggactacttccccgaaccggtgacggtgtcgtggaactcaggcgctctgaccagcggcgtgcacaccttcccagctgtcctacagtcctcaggactctactccctcagcagcgtggtgaccgtgccctccagcaacttcggcacccagacctacacctgcaacgtagatcacaagcccagcaacaccaaggtggacaagacagttgagcgcaaatgttgtgtcgagtgcccaccgtgcccagcaccacctgtggcaggaccgtcagtcttcctcttccccccaaaacccaaggacaccctcatgatctcccggacccctgaggtcacgtgcgtggtggtggacgtgagccacgaagaccccgaggtccagttcaactggtacgtggacggcgtggaggtgcataatgccaagacaaagccacgggaggagcagttcaacagcacgttccgtgtggtcagcgtcctcaccgttgtgcaccaggactggctgaacggcaaggagtacaagtgcaaggtctccaacaaaggcctcccagcccccatcgagaaaaccatctccaaaaccaaagggcagccccgagaaccacaggtgtacaccctgcccccatcccgggaggagatgaccaagaaccaggtcagcctgacctgcctggtcaaaggcttctaccccagcgacatcgccgtggagtgggagagcaatgggcagccggagaacaactacaagaccacacctcccatgctggactccgacggctccttcttcctctacagcaagctcaccgtggacaagagcaggtggcagcaggggaacgtcttctcatgctccgtgatgcatgaggctctgcacaaccactacacgcagaagagcctctccctgtctccgggcaaa

SEQ ID NO: 205 - protein, 237 aa, Artificial Sequence
  Synthetic
MDMRVPAQLLGLLLLWLRGARCEIVMTQSPAILSVSPGERATLSCRASQSVSSNLAWYQQKPGQAPRLLIYGASTRATGVPARFSGGGSGTDFTLTISSLQSEDFAVYYCQHCKTWPPLTFGGGTKVDLKRTVAAPSVFIFPPSDEQLKSGTASVVCLLNNFYPREAKVQWKVDNALQSGNSQESVTEQDSKDSTYSLSSTLTLSKADYEKHKVYACEVTHQGLSSPVTKSFNRGEC

SEQ ID NO: 206 - protein, 467 aa, Artificial Sequence
  Synthetic
MDMRVPAQLLGLLLLWLRGARCEVQLLESGGGLVQPGGSLRLSCAASGFTFSTYAMNWVRQAPGKGLEWVSTVSGSGRPTYYADSVKGRFTISRDNSKNTLYLQMNSLRAEDTAVYYCAKAYYSNYLFDYWGQGTLVTVSSASTKGPSVFPLAPCSRSTSESTAALGCLVKDYFPEPVTVSWNSGALTSGVHTFPAVLQSSGLYSLSSVVTVPSSNFGTQTYTCNVDHKPSNTKVDKTVERKCCVECPPCPAPPVAGPSVFLFPPKPKDTLMISRTPEVTCVVVDVSHEDPEVQFNWYVDGVEVHNAKTKPREEQFNSTFRVVSVLTVVHQDWLNGKEYKCKVSNKGLPAPIEKTISKTKGQPREPQVYTLPPSREEMTKNQVSLTCLVKGFYPSDIAVEWESNGQPENNYKTTPPMLDSDGSFFLYSKLTVDKSRWQQGNVFSCSVMHEALHNHYTQKSLSLSPGK

SEQ ID NO: 207 - DNA, 33 bp, Artificial Sequence; identical to SEQ ID NO: 167
  Synthetic

SEQ ID NO: 208 - DNA, 21 bp, Artificial Sequence
  Synthetic
ggtgcatccaccagggccacg

SEQ ID NO: 209 - DNA, 30 bp, Artificial Sequence
  Synthetic
cagcactgtaagacctggcctccgctcact

SEQ ID NO: 210 - protein, 11 aa, Artificial Sequence
  Synthetic
RASQSVSSNLA

SEQ ID NO: 211 - protein, 7 aa, Artificial Sequence
  Synthetic
GASTRAT

SEQ ID NO: 212 - protein, 10 aa, Artificial Sequence
  Synthetic
QHCKTWPPLT

SEQ ID NO: 213 - DNA, 15 bp, Artificial Sequence
  Synthetic
acctatgccatgaac

SEQ ID NO: 214 - DNA, 51 bp, Artificial Sequence
  Synthetic
actgttagtggtagtggtcgtcccacatactacgcagactccgtgaagggc

SEQ ID NO: 215 - DNA, 30 bp, Artificial Sequence
  Synthetic
gcctactacagtaactacctttttgactac

SEQ ID NO: 216 - protein, 5 aa, Artificial Sequence
  Synthetic
TYAMN

SEQ ID NO: 217 - protein, 17 aa, Artificial Sequence
  Synthetic
TVSGSGRPTYYADSVKG

SEQ ID NO: 218 - protein, 10 aa, Artificial Sequence
  Synthetic
AYYSNYLFDY

SEQ ID NO: 219 - DNA, 324 bp, Artificial Sequence
  Synthetic
gaaatagtgatgacgcagtctccagccatcctgtctgtgtctccaggggaaagagccaccctctcctgcagggccagtcagagtgttagcagcaacttagcctggtaccagcagaaacctggccaggctcccaggctcctcatctatggtgcatccaccagggccacgggtgtcccagccaggttcagtggcggtgggtctgggacagacttcactctcaccatcagcagcctgcagtctgaagattttgcagtttattactgtcagcactgtaagacctggcctccgctcactttcggcggagggaccaaggtggacctcaaa

SEQ ID NO: 220 - DNA, 357 bp, Artificial Sequence
  Synthetic
gaggtgcagctgttggagtctgggggaggcttggtacagcctggggggtccctgagactctcctgtgcagcctctggattcacctttagcacctatgccatgaactgggtccgccaggctccagggaaggggctggagtgggtctcaactgttagtggtagtggtcgtcccacatactacgcagactccgtgaagggccggttcaccatctccagagacaattccaagaacacgctgtatctgcaaatgaacagcctgagagccgaggacacggccgtttattactgtgcgaaggcctactacagtaactacctttttgactactggggccagggaaccctggtcaccgtctcctca

SEQ ID NO: 221 - protein, 108 aa, Artificial Sequence
  Synthetic
EIVMTQSPAILSVSPGERATLSCRASQSVSSNLAWYQQKPGQAPRLLIYGASTRATGVPARFSGGGSGTDFTLTISSLQSEDFAVYYCQHCKTWPPLTFGGGTKVDLK

SEQ ID NO: 222 - protein, 119 aa, Artificial Sequence
  Synthetic
EVQLLESGGGLVQPGGSLRLSCAASGFTFSTYAMNWVRQAPGKGLEWVSTVSGSGRPTYYADSVKGRFTISRDNSKNTLYLQMNSLRAEDTAVYYCAKAYYSNYLFDYWGQGTLVTVSS

SEQ ID NO: 223 - DNA, 711 bp, Artificial Sequence
  Synthetic
atggacatgagggtgcccgctcagctcctggggctcctgctgctgtggctgagaggtgcgcgctgtgaaatagtgatgacgcagtctccagccaccctgtctgtgtctccaggggaaagagccaccctctcctgcagggccagtcagagtattaacagcaacttagcctggtaccagcagaaacctggccaggctcccaggctcctcatctatggtgcatataccagggccactggtatcccagacaggttcagtggcagtgggtctgggacagagttcactctcaccatcagcagcctgcagtctgaagattttgcagtttattactgtcaggagtttattatgtggcctccgtggacgttcggcctagggacccaggtggaaatcaaacgaacggtggctgcaccatctgtcttcatcttcccgccatctgatgagcagttgaaatctggaactgcctctgttgtgtgcctgctgaataacttctatcccagagaggccaaagtacagtggaaggtggataacgccctccaatcgggtaactcccaggagagtgtcacagagcaggacagcaaggacagcacctacagcctcagcagcaccctgacgctgagcaaagcagactacgagaaacacaaagtctacgcctgcgaagtcacccatcagggcctgagctcgcccgtcacaaagagcttcaacaggggagagtgt

SEQ ID NO: 224 - DNA, 1401 bp, Artificial Sequence
  Synthetic
atggacatgagggtgcccgctcagctcctggggctcctgctgctgtggctgagaggtgcgcgctgtgaggtgcaggtgttggagtctgggggaggcttggtacagcctggggagtccctgagactctcctgtacagcctctggattcacctttaacgcctatgccatgagctgggtccgccaggctccagggaaggggctggagtgggtctcaactattagtggtagtggtagtaccacatactacgcagactccgtgaagggccggttcaccatctccagagacaattccaagaacacgctggatctgcaaatgaacagcctgagagccgcggacacggccgtatattactgtgcgaaagttgctggaagtaactttttctttgaccactggggccagggaaccctggttaccgtctcctcagcctccaccaagggcccatcggtcttccccctggcgccctgctccaggagcacctccgagagcacagcggccctgggctgcctggtcaaggactacttccccgaaccggtgacggtgtcgtggaactcaggcgctctgaccagcggcgtgcacaccttcccagctgtcctacagtcctcaggactctactccctcagcagcgtggtgaccgtgccctccagcaacttcggcacccagacctacacctgcaacgtagatcacaagcccagcaacaccaaggtggacaagacagttgagcgcaaatgttgtgtcgagtgcccaccgtgcccagcaccacctgtggcaggaccgtcagtcttcctcttccccccaaaacccaaggacaccctcatgatctcccggacccctgaggtcacgtgcgtggtggtggacgtgagccacgaagaccccgaggtccagttcaactggtacgtggacggcgtggaggtgcataatgccaagacaaagccacgggaggagcagttcaacagcacgttccgtgtggtcagcgtcctcaccgttgtgcaccaggactggctgaacggcaaggagtacaagtgcaaggtctccaacaaaggcctcccagcccccatcgagaaaaccatctccaaaaccaaagggcagccccgagaaccacaggtgtacaccctgcccccatcccgggaggagatgaccaagaaccaggtcagcctgacctgcctggtcaaaggcttctaccccagcgacatcgccgtggagtgggagagcaatgggcagccggagaacaactacaagaccacacctcccatgctggactccgacggctccttcttcctctacagcaagctcaccgtggacaagagcaggtggcagcaggggaacgtcttctcatgctccgtgatgcatgaggctctgcacaaccactacacgcagaagagcctctccctgtctccgggcaaa

SEQ ID NO: 225 - protein, 237 aa, Artificial Sequence
  Synthetic
MDMRVPAQLLGLLLLWLRGARCEIVMTQSPATLSVSPGERATLSCRASQSINSNLAWYQQKPGQAPRLLIYGAYTRATGIPDRFSGSGSGTEFTLTISSLQSEDFAVYYCQEFIMWPPWTFGLGTQVEIKRTVAAPSVFIFPPSDEQLKSGTASVVCLLNNFYPREAKVQWKVDNALQSGNSQESVTEQDSKDSTYSLSSTLTLSKADYEKHKVYACEVTHQGLSSPVTKSFNRGEC

SEQ ID NO: 226 - protein, 467 aa, Artificial Sequence
  Synthetic
MDMRVPAQLLGLLLLWLRGARCEVQVLESGGGLVQPGESLRLSCTASGFTFNAYAMSWVRQAPGKGLEWVSTISGSGSTTYYADSVKGRFTISRDNSKNTLDLQMNSLRAADTAVYYCAKVAGSNFFFDHWGQGTLVTVSSASTKGPSVFPLAPCSRSTSESTAALGCLVKDYFPEPVTVSWNSGALTSGVHTFPAVLQSSGLYSLSSVVTVPSSNFGTQTYTCNVDHKPSNTKVDKTVERKCCVECPPCPAPPVAGPSVFLFPPKPKDTLMISRTPEVTCVVVDVSHEDPEVQFNWYVDGVEVHNAKTKPREEQFNSTFRVVSVLTVVHQDWLNGKEYKCKVSNKGLPAPIEKTISKTKGQPREPQVYTLPPSREEMTKNQVSLTCLVKGFYPSDIAVEWESNGQPENNYKTTPPMLDSDGSFFLYSKLTVDKSRWQQGNVFSCSVMHEALHNHYTQKSLSLSPGK

SEQ ID NO: 227 - DNA, 33 bp, Artificial Sequence
  Synthetic
agggccagtcagagtattaacagcaacttagcc

SEQ ID NO: 228 - DNA, 21 bp, Artificial Sequence
  Synthetic
ggtgcatataccagggccact

SEQ ID NO: 229 - DNA, 30 bp, Artificial Sequence
  Synthetic
caggagtttattatgtggcctccgtggacg

SEQ ID NO: 230 - protein, 11 aa, Artificial Sequence
  Synthetic
RASQSINSNLA

SEQ ID NO: 231 - protein, 7 aa, Artificial Sequence
  Synthetic
GAYTRAT

SEQ ID NO: 232 - protein, 10 aa, Artificial Sequence
  Synthetic
QEFIMWPPWT

SEQ ID NO: 233 - DNA, 15 bp, Artificial Sequence
  Synthetic
gcctatgccatgagc

SEQ ID NO: 234 - DNA, 51 bp, Artificial Sequence
  Synthetic
actattagtggtagtggtagtaccacatactacgcagactccgtgaagggc

SEQ ID NO: 235 - DNA, 30 bp, Artificial Sequence
  Synthetic
gttgctggaagtaactttttctttgaccac

SEQ ID NO: 236 - protein, 5 aa, Artificial Sequence
  Synthetic
AYAMS

SEQ ID NO: 237 - protein, 17 aa, Artificial Sequence
  Synthetic
TISGSGSTTYYADSVKG

SEQ ID NO: 238 - protein, 10 aa, Artificial Sequence
  Synthetic
VAGSNFFFDH

SEQ ID NO: 239 - DNA, 324 bp, Artificial Sequence
  Synthetic
gaaatagtgatgacgcagtctccagccaccctgtctgtgtctccaggggaaagagccaccctctcctgcagggccagtcagagtattaacagcaacttagcctggtaccagcagaaacctggccaggctcccaggctcctcatctatggtgcatataccagggccactggtatcccagacaggttcagtggcagtgggtctgggacagagttcactctcaccatcagcagcctgcagtctgaagattttgcagtttattactgtcaggagtttattatgtggcctccgtggacgttcggcctagggacccaggtggaaatcaaa

SEQ ID NO: 240 - DNA, 357 bp, Artificial Sequence
  Synthetic
gaggtgcaggtgttggagtctgggggaggcttggtacagcctggggagtccctgagactctcctgtacagcctctggattcacctttaacgcctatgccatgagctgggtccgccaggctccagggaaggggctggagtgggtctcaactattagtggtagtggtagtaccacatactacgcagactccgtgaagggccggttcaccatctccagagacaattccaagaacacgctggatctgcaaatgaacagcctgagagccgcggacacggccgtatattactgtgcgaaagttgctggaagtaactttttctttgaccactggggccagggaaccctggttaccgtctcctca

SEQ ID NO: 241 - protein, 108 aa, Artificial Sequence
  Synthetic
EIVMTQSPATLSVSPGERATLSCRASQSINSNLAWYQQKPGQAPRLLIYGAYTRATGIPDRFSGSGSGTEFTLTISSLQSEDFAVYYCQEFIMWPPWTFGLGTQVEIK

SEQ ID NO: 242 - protein, 119 aa, Artificial Sequence
  Synthetic
EVQVLESGGGLVQPGESLRLSCTASGFTFNAYAMSWVRQAPGKGLEWVSTISGSGSTTYYADSVKGRFTISRDNSKNTLDLQMNSLRAADTAVYYCAKVAGSNFFFDHWGQGTLVTVSS

SEQ ID NO: 243 - DNA, 708 bp, Artificial Sequence
  Synthetic
atggacatgagggtgcccgctcagctcctggggctcctgctgctgtggctgagaggtgcgcgctgtgacatccagatgacccagtctccatcctccctgtctgcatctgtaggagacagagtcaacatcacttgccaggcgagtcaggacattaggaaacatttaaattggtatcagcagaaaccagggaaagcccctaacctcctgatctacgatgcagccaatttggaaacaggggtcccatcaaggttcagtggaagtggttctgggacagcttttactttcaccatcagcagcctgcagcctgaagatattgcaacatattactgtcaacactatgctaatctcccgatcaccttcggccaagggacacgactggagattaaacgaacggtggctgcaccatctgtcttcatcttcccgccatctgatgagcagttgaaatctggaactgcctctgttgtgtgcctgctgaataacttctatcccagagaggccaaagtacagtggaaggtggataacgccctccaatcgggtaactcccaggagagtgtcacagagcaggacagcaaggacagcacctacagcctcagcagcaccctgacgctgagcaaagcagactacgagaaacacaaagtctacgcctgcgaagtcacccatcagggcctgagctcgcccgtcacaaagagcttcaacaggggagagtgt

SEQ ID NO: 244 - DNA, 1410 bp, Artificial Sequence
  Synthetic
atggacatgagggtgcccgctcagctcctggggctcctgctgctgtggctgagaggtgcgcgctgtcaggtgcagctggtgcagtctggggctgaggtgaagaagcctggggcctcagtgaaggtctcctgcaaggcttctggatacaccttcaccagatatgatatcaactgggtgcgacaggccactggacaaggacttgagtggatgggatggatgaaccctaacagtggtaactcaggctctgtacagaagttccggggcagagtcaccatgaccaggaacacctccatacacatagcctacatggaactgagcagcctgagatctgaggacacggccgtgtattactgtgcgagaggcgggtataccagcagctggcggtggtacttcgatctctggggccgtggcaccctggtcactgtctcctcagcctccaccaagggcccatcggtcttccccctggcgccctgctccaggagcacctccgagagcacagcggccctgggctgcctggtcaaggactacttccccgaaccggtgacggtgtcgtggaactcaggcgctctgaccagcggcgtgcacaccttcccagctgtcctacagtcctcaggactctactccctcagcagcgtggtgaccgtgccctccagcaacttcggcacccagacctacacctgcaacgtagatcacaagcccagcaacaccaaggtggacaagacagttgagcgcaaatgttgtgtcgagtgcccaccgtgcccagcaccacctgtggcaggaccgtcagtcttcctcttccccccaaaacccaaggacaccctcatgatctcccggacccctgaggtcacgtgcgtggtggtggacgtgagccacgaagaccccgaggtccagttcaactggtacgtggacggcgtggaggtgcataatgccaagacaaagccacgggaggagcagttcaacagcacgttccgtgtggtcagcgtcctcaccgttgtgcaccaggactggctgaacggcaaggagtacaagtgcaaggtctccaacaaaggcctcccagcccccatcgagaaaaccatctccaaaaccaaagggcagccccgagaaccacaggtgtacaccctgcccccatcccgggaggagatgaccaagaaccaggtcagcctgacctgcctggtcaaaggcttctaccccagcgacatcgccgtggagtgggagagcaatgggcagccggagaacaactacaagaccacacctcccatgctggactccgacggctccttcttcctctacagcaagctcaccgtggacaagagcaggtggcagcaggggaacgtcttctcatgctccgtgatgcatgaggctctgcacaaccactacacgcagaagagcctctccctgtctccgggcaaa

SEQ ID NO: 245 - protein, 236 aa, Artificial Sequence
  Synthetic
MDMRVPAQLLGLLLLWLRGARCDIQMTQSPSSLSASVGDRVNITCQASQDIRKHLNWYQQKPGKAPNLLIYDAANLETGVPSRFSGSGSGTAFTFTISSLQPEDIATYYCQHYANLPITFGQGTRLEIKRTVAAPSVFIFPPSDEQLKSGTASVVCLLNNFYPREAKVQWKVDNALQSGNSQESVTEQDSKDSTYSLSSTLTLSKADYEKHKVYACEVTHQGLSSPVTKSFNRGEC

SEQ ID NO: 246 - protein, 470 aa, Artificial Sequence
  Synthetic
MDMRVPAQLLGLLLLWLRGARCQVQLVQSGAEVKKPGASVKVSCKASGYTFTRYDINWVRQATGQGLEWMGWMNPNSGNSGSVQKFRGRVTMTRNTSIHIAYMELSSLRSEDTAVYYCARGGYTSSWRWYFDLWGRGTLVTVSSASTKGPSVFPLAPCSRSTSESTAALGCLVKDYFPEPVTVSWNSGALTSGVHTFPAVLQSSGLYSLSSVVTVPSSNFGTQTYTCNVDHKPSNTKVDKTVERKCCVECPPCPAPPVAGPSVFLFPPKPKDTLMISRTPEVTCVVVDVSHEDPEVQFNWYVDGVEVHNAKTKPREEQFNSTFRVVSVLTVVHQDWLNGKEYKCKVSNKGLPAPIEKTISKTKGQPREPQVYTLPPSREEMTKNQVSLTCLVKGFYPSDIAVEWESNGQPENNYKTTPPMLDSDGSFFLYSKLTVDKSRWQQGNVFSCSVMHEALHNHYTQKSLSLSPGK

SEQ ID NO: 247 - DNA, 33 bp, Artificial Sequence
  Synthetic
caggcgagtcaggacattaggaaacatttaaat

SEQ ID NO: 248 - DNA, 21 bp, Artificial Sequence
  Synthetic
gatgcagccaatttggaaaca

SEQ ID NO: 249 - DNA, 27 bp, Artificial Sequence
  Synthetic
caacactatgctaatctcccgatcacc

SEQ ID NO: 250 - protein, 11 aa, Artificial Sequence
  Synthetic
QASQDIRKHLN

SEQ ID NO: 251 - protein, 7 aa, Artificial Sequence
  Synthetic
DAANLET

SEQ ID NO: 252 - protein, 9 aa, Artificial Sequence
  Synthetic
QHYANLPIT

SEQ ID NO: 253 - DNA, 15 bp, Artificial Sequence
  Synthetic
agatatgatatcaac

SEQ ID NO: 254 - DNA, 51 bp, Artificial Sequence
  Synthetic
tggatgaaccctaacagtggtaactcaggctctgtacagaagttccggggc

SEQ ID NO: 255 - DNA, 39 bp, Artificial Sequence
  Synthetic
ggcgggtataccagcagctggcggtggtacttcgatctc

SEQ ID NO: 256 - protein, 5 aa, Artificial Sequence
  Synthetic
RYDIN

SEQ ID NO: 257 - protein, 17 aa, Artificial Sequence
  Synthetic
WMNPNSGNSGSVQKFRG

SEQ ID NO: 258 - protein, 13 aa, Artificial Sequence
  Synthetic
GGYTSSWRWYFDL

SEQ ID NO: 259 - DNA, 321 bp, Artificial Sequence
  Synthetic
gacatccagatgacccagtctccatcctccctgtctgcatctgtaggagacagagtcaacatcacttgccaggcgagtcaggacattaggaaacatttaaattggtatcagcagaaaccagggaaagcccctaacctcctgatctacgatgcagccaatttggaaacaggggtcccatcaaggttcagtggaagtggttctgggacagcttttactttcaccatcagcagcctgcagcctgaagatattgcaacatattactgtcaacactatgctaatctcccgatcaccttcggccaagggacacgactggagattaaa

SEQ ID NO: 260 - DNA, 366 bp, Artificial Sequence
  Synthetic
caggtgcagctggtgcagtctggggctgaggtgaagaagcctggggcctcagtgaaggtctcctgcaaggcttctggatacaccttcaccagatatgatatcaactgggtgcgacaggccactggacaaggacttgagtggatgggatggatgaaccctaacagtggtaactcaggctctgtacagaagttccggggcagagtcaccatgaccaggaacacctccatacacatagcctacatggaactgagcagcctgagatctgaggacacggccgtgtattactgtgcgagaggcgggtataccagcagctggcggtggtacttcgatctctggggccgtggcaccctggtcactgtctcctca

SEQ ID NO: 261 - protein, 107 aa, Artificial Sequence
  Synthetic
DIQMTQSPSSLSASVGDRVNITCQASQDIRKHLNWYQQKPGKAPNLLIYDAANLETGVPSRFSGSGSGTAFTFTISSLQPEDIATYYCQHYANLPITFGQGTRLEIK

SEQ ID NO: 262 - protein, 122 aa, Artificial Sequence
  Synthetic
QVQLVQSGAEVKKPGASVKVSCKASGYTFTRYDINWVRQATGQGLEWMGWMNPNSGNSGSVQKFRGRVTMTRNTSIHIAYMELSSLRSEDTAVYYCARGGYTSSWRWYFDLWGRGTLVTVSS

SEQ ID NO: 263 - DNA, 699 bp, Artificial Sequence
  Synthetic
atggacatgagggtgcccgctcagctcctggggctcctgctgctgtggctgagaggtgcgcgctgttcctatgagctgactcagccaccctcagtgtccgtgtccccaggacagacagccagcatcacctgctctggagataaattgggggagagaaatgtttgctggtatcagttgaagccaggccagtcccctattctggtcatctatcaagataacaagcggccctcagggatccctgagcgattctctggctccaagtctgggaacacagccattctgaccatcagcgggacccaggcaatggatgaggctgactattactgtcaggcgtgggacagaaatgtggtattcggcggagggaccaagctgaccgtcctaggtcagcccaaggctgcaccctcggtcactctgttcccgccctcctctgaggagcttcaagccaacaaggccacactggtgtgtctcatcagtgacttctacccgggagccgtgacagtggcctggaaggcagatagcagccccgtcaaggcgggagtggaaaccaccacaccctccaaacaaagcaacaacaagtacgcggccagcagctatctgagcctgacgcctgagcagtggaagtcccacagaagctacagctgccaggtcacgcatgaagggagcaccgtggagaagacagtggcccctacagaatgttca

SEQ ID NO: 264 - DNA, 1407 bp, Artificial Sequence
  Synthetic
atggacatgagggtgcccgctcagctcctggggctcctgctgctgtggctgagaggtgcgcgctgtcaggtgcagctggtgcagtctggggctgaggtgaagaagcctggggcctcagtgaaggtctcctgcaaggcttctggatacaccttcaacggctactatatacactgggtgcgacaggcccctggacaagggcttgagtggatgggatggctcaacccaaacagtggtggcgcaaactatgcacagaagtttcagggctgggtcaccatgaccagggacacgtccatcagcacagcctacatggagctgagcaggctgacatctgacgacacggccgtgtattactgtgcgagagatcagaggaagaccacggtgactccctttgagtactggggccagggaaccctggtcaccgtctcctcagcctccaccaagggcccatcggtcttccccctggcgccctgctccaggagcacctccgagagcacagcggccctgggctgcctggtcaaggactacttccccgaaccggtgacggtgtcgtggaactcaggcgctctgaccagcggcgtgcacaccttcccagctgtcctacagtcctcaggactctactccctcagcagcgtggtgaccgtgccctccagcaacttcggcacccagacctacacctgcaacgtagatcacaagcccagcaacaccaaggtggacaagacagttgagcgcaaatgttgtgtcgagtgcccaccgtgcccagcaccacctgtggcaggaccgtcagtcttcctcttccccccaaaacccaaggacaccctcatgatctcccggacccctgaggtcacgtgcgtggtggtggacgtgagccacgaagaccccgaggtccagttcaactggtacgtggacggcgtggaggtgcataatgccaagacaaagccacgggaggagcagttcaacagcacgttccgtgtggtcagcgtcctcaccgttgtgcaccaggactggctgaacggcaaggagtacaagtgcaaggtctccaacaaaggcctcccagcccccatcgagaaaaccatctccaaaaccaaagggcagccccgagaaccacaggtgtacaccctgcccccatcccgggaggagatgaccaagaaccaggtcagcctgacctgcctggtcaaaggcttctaccccagcgacatcgccgtggagtgggagagcaatgggcagccggagaacaactacaagaccacacctcccatgctggactccgacggctccttcttcctctacagcaagctcaccgtggacaagagcaggtggcagcaggggaacgtcttctcatgctccgtgatgcatgaggctctgcacaaccactacacgcagaagagcctctccctgtctccgggcaaa

SEQ ID NO: 265 - protein, 233 aa, Artificial Sequence
  Synthetic
MDMRVPAQLLGLLLLWLRGARCSYELTQPPSVSVSPGQTASITCSGDKLGERNVCWYQLKPGQSPILVIYQDNKRPSGIPERFSGSKSGNTAILTISGTQAMDEADYYCQAWDRNVVFGGGTKLTVLGQPKAAPSVTLFPPSSEELQANKATLVCLISDFYPGAVTVAWKADSSPVKAGVETTTPSKQSNNKYAASSYLSLTPEQWKSHRSYSCQVTHEGSTVEKTVAPTECS

SEQ ID NO: 266 - protein, 469 aa, Artificial Sequence
  Synthetic
MDMRVPAQLLGLLLLWLRGARCQVQLVQSGAEVKKPGASVKVSCKASGYTFNGYYIHWVRQAPGQGLEWMGWLNPNSGGANYAQKFQGWVTMTRDTSISTAYMELSRLTSDDTAVYYCARDQRKTTVTPFEYWGQGTLVTVSSASTKGPSVFPLAPCSRSTSESTAALGCLVKDYFPEPVTVSWNSGALTSGVHTFPAVLQSSGLYSLSSVVTVPSSNFGTQTYTCNVDHKPSNTKVDKTVERKCCVECPPCPAPPVAGPSVFLFPPKPKDTLMISRTPEVTCVVVDVSHEDPEVQFNWYVDGVEVHNAKTKPREEQFNSTFRVVSVLTVVHQDWLNGKEYKCKVSNKGLPAPIEKTISKTKGQPREPQVYTLPPSREEMTKNQVSLTCLVKGFYPSDIAVEWESNGQPENNYKTTPPMLDSDGSFFLYSKLTVDKSRWQQGNVFSCSVMHEALHNHYTQKSLSLSPGK

SEQ ID NO: 267 - DNA, 33 bp, Artificial Sequence
  Synthetic
tctggagataaattgggggagagaaatgtttgc

SEQ ID NO: 268 - DNA, 21 bp, Artificial Sequence
  Synthetic
caagataacaagcggccctca

SEQ ID NO: 269 - DNA, 24 bp, Artificial Sequence
  Synthetic
caggcgtgggacagaaatgtggta

SEQ ID NO: 270 - protein, 11 aa, Artificial Sequence
  Synthetic
SGDKLGERNVC

SEQ ID NO: 271 - protein, 7 aa, Artificial Sequence
  Synthetic
QDNKRPS

SEQ ID NO: 272 - protein, 8 aa, Artificial Sequence
  Synthetic
QAWDRNVV

SEQ ID NO: 273 - DNA, 15 bp, Artificial Sequence
  Synthetic
ggctactatatacac

SEQ ID NO: 274 - DNA, 51 bp, Artificial Sequence
  Synthetic
tggctcaacccaaacagtggtggcgcaaactatgcacagaagtttcagggc

SEQ ID NO: 275 - DNA, 36 bp, Artificial Sequence
  Synthetic
gatcagaggaagaccacggtgactccctttgagtac

SEQ ID NO: 276 - protein, 5 aa, Artificial Sequence
  Synthetic
GYYIH

SEQ ID NO: 277 - protein, 17 aa, Artificial Sequence
  Synthetic
WLNPNSGGANYAQKFQG

SEQ ID NO: 278 - protein, 12 aa, Artificial Sequence
  Synthetic
DQRKTTVTPFEY

SEQ ID NO: 279 - DNA, 315 bp, Artificial Sequence
  Synthetic
tcctatgagctgactcagccaccctcagtgtccgtgtccccaggacagacagccagcatcacctgctctggagataaattgggggagagaaatgtttgctggtatcagttgaagccaggccagtcccctattctggtcatctatcaagataacaagcggccctcagggatccctgagcgattctctggctccaagtctgggaacacagccattctgaccatcagcgggacccaggcaatggatgaggctgactattactgtcaggcgtgggacagaaatgtggtattcggcggagggaccaagctgaccgtccta

SEQ ID NO: 280 - DNA, 363 bp, Artificial Sequence
  Synthetic
caggtgcagctggtgcagtctggggctgaggtgaagaagcctggggcctcagtgaaggtctcctgcaaggcttctggatacaccttcaacggctactatatacactgggtgcgacaggcccctggacaagggcttgagtggatgggatggctcaacccaaacagtggtggcgcaaactatgcacagaagtttcagggctgggtcaccatgaccagggacacgtccatcagcacagcctacatggagctgagcaggctgacatctgacgacacggccgtgtattactgtgcgagagatcagaggaagaccacggtgactccctttgagtactggggccagggaaccctggtcaccgtctcctca

SEQ ID NO: 281 - protein, 105 aa, Artificial Sequence
  Synthetic
SYELTQPPSVSVSPGQTASITCSGDKLGERNVCWYQLKPGQSPILVIYQDNKRPSGIPERFSGSKSGNTAILTISGTQAMDEADYYCQAWDRNVVFGGGTKLTVL

SEQ ID NO: 282 - protein, 121 aa, Artificial Sequence
  Synthetic
QVQLVQSGAEVKKPGASVKVSCKASGYTFNGYYIHWVRQAPGQGLEWMGWLNPNSGGANYAQKFQGWVTMTRDTSISTAYMELSRLTSDDTAVYYCARDQRKTTVTPFEYWGQGTLVTVSS

SEQ ID NO: 283 - protein, 449 aa, Artificial Sequence
  Synthetic
EVQVLESGGGLVQPGESLRLSCTASGFTFNAYAMSWVRQAPGKGLEWVSTISGSGSTTYYADSVKGRFTISRDNSKNTLDLQMNSLRAADTAVYYCAKVAGSNFFFDHWGQGTLVTVSSASTKGPSVFPLAPSSKSTSGGTAALGCLVKDYFPEPVTVSWNSGALTSGVHTFPAVLQSSGLYSLSSVVTVPSSSLGTQTYICNVNHKPSNTKVDKKVEPKSCDKTHTCPPCPAPELLGGPSVFLFPPKPKDTLMISRTPEVTCVVVDVSHEDPEVKFNWYVDGVEVHNAKTKPCEEQYGSTYRCVSVLTVLHQDWLNGKEYKCKVSNKALPAPIEKTISKAKGQPREPQVYTLPPSREEMTKNQVSLTCLVKGFYPSDIAVEWESNGQPENNYKTTPPVLDSDGSFFLYSKLTVDKSRWQQGNVFSCSVMHEALHNHYTQKSLSLSPGK

SEQ ID NO: 284 - DNA, 1416 bp, Artificial Sequence
  Synthetic
atggacatgagggtgcccgctcagctcctggggctcctgctgctgtggctgagaggtgcgcgctgtgaggtgcaggtgttggagtctgggggaggcttggtacagcctggggagtccctgagactctcctgtacagcctctggattcacctttaacgcctatgccatgagctgggtccgccaggctccagggaaggggctggagtgggtgtcaactattagtggtagtggtagtaccacatactacgcagactccgtgaagggccggttcaccatctccagagacaattccaagaacacgctggatctgcaaatgaacagcctgagagccgcggacacggccgtatattactgtgcgaaagttgctggaagtaactttttctttgaccactggggccagggaaccctggttaccgtgtcctcagcctccaccaagggcccatcggtcttccccctggcaccctcctccaagagcacctctgggggcacagcggccctgggctgcctggtcaaggactacttccccgaaccggtgacggtgtcgtggaactcaggcgccctgaccagcggcgtgcacaccttcccggctgtcctacagtcctcaggactctactccctcagcagcgtggtgaccgtgccctccagcagcttgggcacccagacctacatctgcaacgtgaatcacaagcccagcaacaccaaggtggacaagaaagttgagcccaaatcttgtgacaaaactcacacatgcccaccgtgcccagcacctgaactcctggggggaccgtcagtcttcctcttccccccaaaacccaaggacaccctcatgatctcccggacccctgaggtcacatgcgtggtggtggacgtgagccacgaagaccctgaggtcaagttcaactggtacgtggacggcgtggaggtgcataatgccaagacaaagccgtgcgaggagcagtacggcagcacgtaccgttgcgtcagcgtcctcaccgtcctgcaccaggactggctgaatggcaaggagtacaagtgcaaggtgtccaacaaagccctcccagcccccatcgagaaaaccatctccaaagccaaagggcagccccgagaaccacaggtgtacaccctgcccccatcccgggaggagatgaccaagaaccaggtcagcctgacctgcctggtcaaaggcttctatcccagcgacatcgccgtggagtgggagagcaatgggcagccggagaacaactacaagaccacgcctcccgtgctggactccgacggctccttcttcctctatagcaagctcaccgtggacaagagcaggtggcagcaggggaacgtcttctcatgctccgtgatgcatgaggctctgcacaaccactacacgcagaagagcctctccctgtctccgggcaaatag

SEQ ID NO: 285 - protein, 452 aa, Artificial Sequence
  Synthetic
QVQLVQSGAEVKKPGASVKVSCKASGYTFTRYDINWVRQATGQGLEWMGWMNPNSGNSGSVQKFRGRVTMTRDTSIHIAYMELSSLRSEDTAVYYCARGGYTSSWRWYFDLWGRGTLVTVSSASTKGPSVFPLAPSSKSTSGGTAALGCLVKDYFPEPVTVSWNSGALTSGVHTFPAVLQSSGLYSLSSVVTVPSSSLGTQTYICNVNHKPSNTKVDKKVEPKSCDKTHTCPPCPAPELLGGPSVFLFPPKPKDTLMISRTPEVTCVVVDVSHEDPEVKFNWYVDGVEVHNAKTKPCEEQYGSTYRCVSVLTVLHQDWLNGKEYKCKVSNKALPAPIEKTISKAKGQPREPQVYTLPPSREEMTKNQVSLTCLVKGFYPSDIAVEWESNGQPENNYKTTPPVLDSDGSFFLYSKLTVDKSRWQQGNVFSCSVMHEALHNHYTQKSLSLSPGK

SEQ ID NO: 286 - DNA, 1425 bp, Artificial Sequence
  Synthetic
atggacatgagggtgcccgctcagctcctggggctcctgctgctgtggctgagaggtgcgcgctgtcaggtgcagctggtgcagtctggggctgaggtgaagaagcctggggcctcagtgaaggtgtcctgcaaggcttctggatacaccttcaccagatatgatatcaactgggtgcgacaggccactggacaaggacttgagtggatgggatggatgaaccctaacagtggtaactcaggctctgtacagaagttccggggcagagtcaccatgaccagggacacctccatccacatcgcctacatggaactgagcagcctgagatctgaggacacggccgtgtattactgtgcgagaggcgggtataccagcagctggcggtggtacttcgatctctggggccgtggcaccctggtcactgtctcctcagcctccaccaagggcccatcggtcttccccctggcaccctcctccaagagcacctctgggggcacagcggccctgggctgcctggtcaaggactacttccccgaaccggtgacggtgtcgtggaactcaggcgccctgaccagcggcgtgcacaccttcccggctgtcctacagtcctcaggactctactccctcagcagcgtggtgaccgtgccctccagcagcttgggcacccagacctacatctgcaacgtgaatcacaagcccagcaacaccaaggtggacaagaaagttgagcccaaatcttgtgacaaaactcacacatgcccaccgtgcccagcacctgaactcctggggggaccgtcagtcttcctcttccccccaaaacccaaggacaccctcatgatctcccggacccctgaggtcacatgcgtggtggtggacgtgagccacgaagaccctgaggtcaagttcaactggtacgtggacggcgtggaggtgcataatgccaagacaaagccgtgcgaggagcagtacggcagcacgtaccgttgcgtcagcgtcctcaccgtcctgcaccaggactggctgaatggcaaggagtacaagtgcaaggtgtccaacaaagccctcccagcccccatcgagaaaaccatctccaaagccaaagggcagccccgagaaccacaggtgtacaccctgcccccatcccgggaggagatgaccaagaaccaggtcagcctgacctgcctggtcaaaggcttctatcccagcgacatcgccgtggagtgggagagcaatgggcagccggagaacaactacaagaccacgcctcccgtgctggactccgacggctccttcttcctctatagcaagctcaccgtggacaagagcaggtggcagcaggggaacgtcttctcatgctccgtgatgcatgaggctctgcacaaccactacacgcagaagagcctctccctgtctccgggcaaatag

SEQ ID NO: 287 - protein, 451 aa, Artificial Sequence
  Synthetic
QVQLVQSGAEVKKPGASVKVSCKASGYTFNGYYIHWVRQAPGQGLEWMGWLNPNSGGANYAQKFQGWVTMTRDTSISTAYMELSRLTSDDTAVYYCARDQRKTTVTPFEYWGQGTLVTVSSASTKGPSVFPLAPSSKSTSGGTAALGCLVKDYFPEPVTVSWNSGALTSGVHTFPAVLQSSGLYSLSSVVTVPSSSLGTQTYICNVNHKPSNTKVDKKVEPKSCDKTHTCPPCPAPELLGGPSVFLFPPKPKDTLMISRTPEVTCVVVDVSHEDPEVKFNWYVDGVEVHNAKTKPCEEQYGSTYRCVSVLTVLHQDWLNGKEYKCKVSNKALPAPIEKTISKAKGQPREPQVYTLPPSREEMTKNQVSLTCLVKGFYPSDIAVEWESNGQPENNYKTTPPVLDSDGSFFLYSKLTVDKSRWQQGNVFSCSVMHEALHNHYTQKSLSLSPGK

SEQ ID NO: 288 - DNA, 1422 bp, Artificial Sequence
  Synthetic
atggacatgagggtgcccgctcagctcctggggctcctgctgctgtggctgagaggtgcgcgctgtcaggtgcagctggtgcagtctggggctgaggtgaagaagcctggggcctcagtgaaggtgtcctgcaaggcttctggatacaccttcaacggctactatatccactgggtgcgacaggcccctggacaagggcttgagtggatgggatggctcaacccaaacagtggtggcgcaaactatgcacagaagtttcagggctgggtcaccatgaccagggacacgtccatcagcacagcctacatggagctgagcaggctgacatctgacgacacggccgtgtattactgtgcgagagatcagaggaagaccacggtgactccctttgagtactggggccagggaaccctggtcaccgtgtcctcagcctccaccaagggcccatcggtcttccccctggcaccctcctccaagagcacctctgggggcacagcggccctgggctgcctggtcaaggactacttccccgaaccggtgacggtgtcgtggaactcaggcgccctgaccagcggcgtgcacaccttcccggctgtcctacagtcctcaggactctactccctcagcagcgtggtgaccgtgccctccagcagcttgggcacccagacctacatctgcaacgtgaatcacaagcccagcaacaccaaggtggacaagaaagttgagcccaaatcttgtgacaaaactcacacatgcccaccgtgcccagcacctgaactcctggggggaccgtcagtcttcctcttccccccaaaacccaaggacaccctcatgatctcccggacccctgaggtcacatgcgtggtggtggacgtgagccacgaagaccctgaggtcaagttcaactggtacgtggacggcgtggaggtgcataatgccaagacaaagccgtgcgaggagcagtacggcagcacgtaccgttgcgtcagcgtcctcaccgtcctgcaccaggactggctgaatggcaaggagtacaagtgcaaggtgtccaacaaagccctcccagcccccatcgagaaaaccatctccaaagccaaagggcagccccgagaaccacaggtgtacaccctgcccccatcccgggaggagatgaccaagaaccaggtcagcctgacctgcctggtcaaaggcttctatcccagcgacatcgccgtggagtgggagagcaatgggcagccggagaacaactacaagaccacgcctcccgtgctggactccgacggctccttcttcctctatagcaagctcaccgtggacaagagcaggtggcagcaggggaacgtcttctcatgctccgtgatgcatgaggctctgcacaaccactacacgcagaagagcctctccctgtctccgggcaaatag

SEQ ID NO: 289 - protein, 449 aa, Artificial Sequence
  Synthetic
EVQLLESGGGLVQPGGSLRLSCAASGFTFSTYAMNWVRQAPGKGLEWVSTVSGSGRPTYYADSVKGRFTISRDNSKNTLYLQMNSLRAEDTAVYYCAKAYYSNYLFDYWGQGTLVTVSSASTKGPSVFPLAPSSKSTSGGTAALGCLVKDYFPEPVTVSWNSGALTSGVHTFPAVLQSSGLYSLSSVVTVPSSSLGTQTYICNVNHKPSNTKVDKKVEPKSCDKTHTCPPCPAPELLGGPSVFLFPPKPKDTLMISRTPEVTCVVVDVSHEDPEVKFNWYVDGVEVHNAKTKPCEEQYGSTYRCVSVLTVLHQDWLNGKEYKCKVSNKALPAPIEKTISKAKGQPREPQVYTLPPSREEMTKNQVSLTCLVKGFYPSDIAVEWESNGQPENNYKTTPPVLDSDGSFFLYSKLTVDKSRWQQGNVFSCSVMHEALHNHYTQKSLSLSPGK

SEQ ID NO: 290 - DNA, 1416 bp, Artificial Sequence
  Synthetic
atggacatgagggtgcccgctcagctcctggggctcctgctgctgtggctgagaggtgcgcgctgtgaggtgcagctgttggagtctgggggaggcttggtacagcctggggggtccctgagactctcctgtgcagcctctggattcacctttagcacctatgccatgaactgggtccgccaggctccagggaaggggctggagtgggtgtcaactgttagtggtagtggtcgtcccacatactacgcagactccgtgaagggccggttcaccatctccagagacaattccaagaacacgctgtatctgcaaatgaacagcctgagagccgaggacacggccgtttattactgtgcgaaggcctactacagtaactacctttttgactactggggccagggaaccctggtcaccgtgtcctcagcctccaccaagggcccatcggtcttccccctggcaccctcctccaagagcacctctgggggcacagcggccctgggctgcctggtcaaggactacttccccgaaccggtgacggtgtcgtggaactcaggcgccctgaccagcggcgtgcacaccttcccggctgtcctacagtcctcaggactctactccctcagcagcgtggtgaccgtgccctccagcagcttgggcacccagacctacatctgcaacgtgaatcacaagcccagcaacaccaaggtggacaagaaagttgagcccaaatcttgtgacaaaactcacacatgcccaccgtgcccagcacctgaactcctggggggaccgtcagtcttcctcttccccccaaaacccaaggacaccctcatgatctcccggacccctgaggtcacatgcgtggtggtggacgtgagccacgaagaccctgaggtcaagttcaactggtacgtggacggcgtggaggtgcataatgccaagacaaagccgtgcgaggagcagtacggcagcacgtaccgttgcgtcagcgtcctcaccgtcctgcaccaggactggctgaatggcaaggagtacaagtgcaaggtgtccaacaaagccctcccagcccccatcgagaaaaccatctccaaagccaaagggcagccccgagaaccacaggtgtacaccctgcccccatcccgggaggagatgaccaagaaccaggtcagcctgacctgcctggtcaaaggcttctatcccagcgacatcgccgtggagtgggagagcaatgggcagccggagaacaactacaagaccacgcctcccgtgctggactccgacggctccttcttcctctatagcaagctcaccgtggacaagagcaggtggcagcaggggaacgtcttctcatgctccgtgatgcatgaggctctgcacaaccactacacgcagaagagcctctccctgtctccgggcaaatag

SEQ ID NO: 291 - protein, 449 aa, Artificial Sequence
  Synthetic
EVQLLESGGGMVQPGGSLRLSCAVSGFTFSRYAMSWVRQAPGKGLEWVSEMRGSSGSTYYADSVKGRFTISRDNSKNTLYLQMNSLRVEDTAIYYCAKEFSSNSLFDYWGQGTLVTVSSASTKGPSVFPLAPSSKSTSGGTAALGCLVKDYFPEPVTVSWNSGALTSGVHTFPAVLQSSGLYSLSSVVTVPSSSLGTQTYICNVNHKPSNTKVDKKVEPKSCDKTHTCPPCPAPELLGGPSVFLFPPKPKDTLMISRTPEVTCVVVDVSHEDPEVKFNWYVDGVEVHNAKTKPCEEQYGSTYRCVSVLTVLHQDWLNGKEYKCKVSNKALPAPIEKTISKAKGQPREPQVYTLPPSREEMTKNQVSLTCLVKGFYPSDIAVEWESNGQPENNYKTTPPVLDSDGSFFLYSKLTVDKSRWQQGNVFSCSVMHEALHNHYTQKSLSLSPGK

SEQ ID NO: 292 - DNA, 1416 bp, Artificial Sequence
  Synthetic
atggacatgagggtgcccgctcagctcctggggctcctgctgctgtggctgagaggtgcgcgctgtgaggtgcagctgttggagtctgggggaggcatggtacagccgggggggtccctgagactctcctgtgcagtctctggattcacctttagtcgctatgccatgagctgggtccgccaggctccagggaaggggctggagtgggtgtcagaaatgaggggtagtagtggtagcacatactacgcagactccgtgaagggccggttcaccatctccagagacaattccaagaacacgctgtatctgcaaatgaacagcctgagagtcgaggacacggccatctattactgtgcgaaagaatttagcagcaactccctctttgactactggggccagggaaccctggtcaccgtgtcctcagcctccaccaagggcccatcggtcttccccctggcaccctcctccaagagcacctctgggggcacagcggccctgggctgcctggtcaaggactacttccccgaaccggtgacggtgtcgtggaactcaggcgccctgaccagcggcgtgcacaccttcccggctgtcctacagtcctcaggactctactccctcagcagcgtggtgaccgtgccctccagcagcttgggcacccagacctacatctgcaacgtgaatcacaagcccagcaacaccaaggtggacaagaaagttgagcccaaatcttgtgacaaaactcacacatgcccaccgtgcccagcacctgaactcctggggggaccgtcagtcttcctcttccccccaaaacccaaggacaccctcatgatctcccggacccctgaggtcacatgcgtggtggtggacgtgagccacgaagaccctgaggtcaagttcaactggtacgtggacggcgtggaggtgcataatgccaagacaaagccgtgcgaggagcagtacggcagcacgtaccgttgcgtcagcgtcctcaccgtcctgcaccaggactggctgaatggcaaggagtacaagtgcaaggtgtccaacaaagccctcccagcccccatcgagaaaaccatctccaaagccaaagggcagccccgagaaccacaggtgtacaccctgcccccatcccgggaggagatgaccaagaaccaggtcagcctgacctgcctggtcaaaggcttctatcccagcgacatcgccgtggagtgggagagcaatgggcagccggagaacaactacaagaccacgcctcccgtgctggactccgacggctccttcttcctctatagcaagctcaccgtggacaagagcaggtggcagcaggggaacgtcttctcatgctccgtgatgcatgaggctctgcacaaccactacacgcagaagagcctctccctgtctccgggcaaatag

SEQ ID NO: 293 - protein, 446 aa, Artificial Sequence
  Synthetic
EVQLVESGGGLVQPGGSLRLSCAASGFTFSSNWMSWVRQAPGKGLDWMASMKQDGSEIYYVDSVKGRFTISRDNAKNSLHLQMNSLRAEDTAVYYCVRGGWRFESWGQGALVTVSSASTKGPSVFPLAPSSKSTSGGTAALGCLVKDYFPEPVTVSWNSGALTSGVHTFPAVLQSSGLYSLSSVVTVPSSSLGTQTYICNVNHKPSNTKVDKKVEPKSCDKTHTCPPCPAPELLGGPSVFLFPPKPKDTLMISRTPEVTCVVVDVSHEDPEVKFNWYVDGVEVHNAKTKPCEEQYGSTYRCVSVLTVLHQDWLNGKEYKCKVSNKALPAPIEKTISKAKGQPREPQVYTLPPSREEMTKNQVSLTCLVKGFYPSDIAVEWESNGQPENNYKTTPPVLDSDGSFFLYSKLTVDKSRWQQGNVFSCSVMHEALHNHYTQKSLSLSPGK

SEQ ID NO: 294 - DNA, 1407 bp, Artificial Sequence
  Synthetic
atggacatgagggtgcccgctcagctcctggggctcctgctgctgtggctgagaggtgcgcgctgtgaggtgcagctggtggagtctgggggaggcttggtccagcctggggggtccctgagactctcctgtgcagcctctggattcacctttagcagcaattggatgagctgggtccgccaggctccagggaaggggctggactggatggccagcatgaagcaagatggaagtgagatctactatgtggactctgtgaagggccgattcaccatctccagagacaacgccaagaactcactgcatctgcaaatgaacagcctgagagccgaggacacggctgtgtattactgtgtgagaggagggtggagatttgagtcctggggccagggagccctggtcaccgtgtcctcagcctccaccaagggcccatcggtcttccccctggcaccctcctccaagagcacctctgggggcacagcggccctgggctgcctggtcaaggactacttccccgaaccggtgacggtgtcgtggaactcaggcgccctgaccagcggcgtgcacaccttcccggctgtcctacagtcctcaggactctactccctcagcagcgtggtgaccgtgccctccagcagcttgggcacccagacctacatctgcaacgtgaatcacaagcccagcaacaccaaggtggacaagaaagttgagcccaaatcttgtgacaaaactcacacatgcccaccgtgcccagcacctgaactcctggggggaccgtcagtcttcctcttccccccaaaacccaaggacaccctcatgatctcccggacccctgaggtcacatgcgtggtggtggacgtgagccacgaagaccctgaggtcaagttcaactggtacgtggacggcgtggaggtgcataatgccaagacaaagccgtgcgaggagcagtacggcagcacgtaccgttgcgtcagcgtcctcaccgtcctgcaccaggactggctgaatggcaaggagtacaagtgcaaggtgtccaacaaagccctcccagcccccatcgagaaaaccatctccaaagccaaagggcagccccgagaaccacaggtgtacaccctgcccccatcccgggaggagatgaccaagaaccaggtcagcctgacctgcctggtcaaaggcttctatcccagcgacatcgccgtggagtgggagagcaatgggcagccggagaacaactacaagaccacgcctcccgtgctggactccgacggctccttcttcctctatagcaagctcaccgtggacaagagcaggtggcagcaggggaacgtcttctcatgctccgtgatgcatgaggctctgcacaaccactacacgcagaagagcctctccctgtctccgggcaaatag

SEQ ID NO: 295 - protein, 447 aa, Artificial Sequence
  Synthetic
EVQLVESGGGLVQPGGSLRLSCAASGFTFSSYWMSWVRQAPGKGLEWVANIKQDGSEEYYVDSVKGRFTISRDNAKNSLFLQMNSLRAEDTAVYYCARDYGDSFDYWGQGTLVTVSSASTKGPSVFPLAPSSKSTSGGTAALGCLVKDYFPEPVTVSWNSGALTSGVHTFPAVLQSSGLYSLSSVVTVPSSSLGTQTYICNVNHKPSNTKVDKKVEPKSCDKTHTCPPCPAPELLGGPSVFLFPPKPKDTLMISRTPEVTCVVVDVSHEDPEVKFNWYVDGVEVHNAKTKPCEEQYGSTYRCVSVLTVLHQDWLNGKEYKCKVSNKALPAPIEKTISKAKGQPREPQVYTLPPSREEMTKNQVSLTCLVKGFYPSDIAVEWESNGQPENNYKTTPPVLDSDGSFFLYSKLTVDKSRWQQGNVFSCSVMHEALHNHYTQKSLSLSPGK

SEQ ID NO: 296 - DNA, 1410 bp, Artificial Sequence
  Synthetic
atggacatgagggtgcccgctcagctcctggggctcctgctgctgtggctgagaggtgcgcgctgtgaggtgcagctggtggagtctgggggaggcttggtccagccgggggggtccctgagactctcctgtgcagcctctggattcacctttagtagctattggatgagctgggtccgccaggctccagggaaggggctggagtgggtggccaacatcaagcaagatggaagtgaggaatattatgtggactctgtgaagggccgattcaccatctccagagacaacgccaagaactcactgtttctgcaaatgaacagcctgagagccgaggacacggctgtgtattactgtgcgagagactacggtgactcctttgactactggggccagggaaccctggtcaccgtgtcctcagcctccaccaagggcccatcggtcttccccctggcaccctcctccaagagcacctctgggggcacagcggccctgggctgcctggtcaaggactacttccccgaaccggtgacggtgtcgtggaactcaggcgccctgaccagcggcgtgcacaccttcccggctgtcctacagtcctcaggactctactccctcagcagcgtggtgaccgtgccctccagcagcttgggcacccagacctacatctgcaacgtgaatcacaagcccagcaacaccaaggtggacaagaaagttgagcccaaatcttgtgacaaaactcacacatgcccaccgtgcccagcacctgaactcctggggggaccgtcagtcttcctcttccccccaaaacccaaggacaccctcatgatctcccggacccctgaggtcacatgcgtggtggtggacgtgagccacgaagaccctgaggtcaagttcaactggtacgtggacggcgtggaggtgcataatgccaagacaaagccgtgcgaggagcagtacggcagcacgtaccgttgcgtcagcgtcctcaccgtcctgcaccaggactggctgaatggcaaggagtacaagtgcaaggtgtccaacaaagccctcccagcccccatcgagaaaaccatctccaaagccaaagggcagccccgagaaccacaggtgtacaccctgcccccatcccgggaggagatgaccaagaaccaggtcagcctgacctgcctggtcaaaggcttctatcccagcgacatcgccgtggagtgggagagcaatgggcagccggagaacaactacaagaccacgcctcccgtgctggactccgacggctccttcttcctctatagcaagctcaccgtggacaagagcaggtggcagcaggggaacgtcttctcatgctccgtgatgcatgaggctctgcacaaccactacacgcagaagagcctctccctgtctccgggcaaatag

SEQ ID NO: 297 - protein, 452 aa, Artificial Sequence
  Synthetic
QVQLVQSGAEVKKPGASVKVSCKASGYTFTRYDINWVRQATGQGLEWMGWLNPNSGNTGQTQKFRGRVTMTRDTSINTAYMELSSLRSEDTAVYYCARGGYTSAWRWYFDLWGRGTLVTVSSASTKGPSVFPLAPSSKSTSGGTAALGCLVKDYFPEPVTVSWNSGALTSGVHTFPAVLQSSGLYSLSSVVTVPSSSLGTQTYICNVNHKPSNTKVDKKVEPKSCDKTHTCPPCPAPELLGGPSVFLFPPKPKDTLMISRTPEVTCVVVDVSHEDPEVKFNWYVDGVEVHNAKTKPCEEQYGSTYRCVSVLTVLHQDWLNGKEYKCKVSNKALPAPIEKTISKAKGQPREPQVYTLPPSREEMTKNQVSLTCLVKGFYPSDIAVEWESNGQPENNYKTTPPVLDSDGSFFLYSKLTVDKSRWQQGNVFSCSVMHEALHNHYTQKSLSLSPGK

SEQ ID NO: 298 - DNA, 1425 bp, Artificial Sequence
  Synthetic
atggacatgagggtgcccgctcagctcctggggctcctgctgctgtggctgagaggtgcgcgctgtcaggtgcagctggtgcagtctggggctgaggtgaagaagcctggggcctcagtgaaggtgtcctgcaaggcttctggatacaccttcacccgttatgatatcaactgggtgcgacaggccactggacaagggcttgagtggatgggatggctgaaccctaatagtggtaacacaggccagacacagaagttccggggcagagtcaccatgaccagggacacctccatcaatacagcctacatggagctgagcagcctgagatctgaggacacggccgtgtattactgtgcgagaggggggtataccagtgcctggagatggtacttcgatctctggggccgtggcaccctggtcactgtctcctcagcctccaccaagggcccatcggtcttccccctggcaccctcctccaagagcacctctgggggcacagcggccctgggctgcctggtcaaggactacttccccgaaccggtgacggtgtcgtggaactcaggcgccctgaccagcggcgtgcacaccttcccggctgtcctacagtcctcaggactctactccctcagcagcgtggtgaccgtgccctccagcagcttgggcacccagacctacatctgcaacgtgaatcacaagcccagcaacaccaaggtggacaagaaagttgagcccaaatcttgtgacaaaactcacacatgcccaccgtgcccagcacctgaactcctggggggaccgtcagtcttcctcttccccccaaaacccaaggacaccctcatgatctcccggacccctgaggtcacatgcgtggtggtggacgtgagccacgaagaccctgaggtcaagttcaactggtacgtggacggcgtggaggtgcataatgccaagacaaagccgtgcgaggagcagtacggcagcacgtaccgttgcgtcagcgtcctcaccgtcctgcaccaggactggctgaatggcaaggagtacaagtgcaaggtgtccaacaaagccctcccagcccccatcgagaaaaccatctccaaagccaaagggcagccccgagaaccacaggtgtacaccctgcccccatcccgggaggagatgaccaagaaccaggtcagcctgacctgcctggtcaaaggcttctatcccagcgacatcgccgtggagtgggagagcaatgggcagccggagaacaactacaagaccacgcctcccgtgctggactccgacggctccttcttcctctatagcaagctcaccgtggacaagagcaggtggcagcaggggaacgtcttctcatgctccgtgatgcatgaggctctgcacaaccactacacgcagaagagcctctccctgtctccgggcaaatag

SEQ ID NO: 299 - protein, 449 aa, Artificial Sequence
  Synthetic
EVQLLESGGGLVQPGGSLRLSCAASGFTFSSYAMTWVRQAPGRGLQWVSTISGSGSNTYYADSVKGRFTISRDNSKNTLYLQMSSLRAEDTAVYYCAKEGGSNRYFHHWGQGTLVTISSASTKGPSVFPLAPSSKSTSGGTAALGCLVKDYFPEPVTVSWNSGALTSGVHTFPAVLQSSGLYSLSSVVTVPSSSLGTQTYICNVNHKPSNTKVDKKVEPKSCDKTHTCPPCPAPELLGGPSVFLFPPKPKDTLMISRTPEVTCVVVDVSHEDPEVKFNWYVDGVEVHNAKTKPCEEQYGSTYRCVSVLTVLHQDWLNGKEYKCKVSNKALPAPIEKTISKAKGQPREPQVYTLPPSREEMTKNQVSLTCLVKGFYPSDIAVEWESNGQPENNYKTTPPVLDSDGSFFLYSKLTVDKSRWQQGNVFSCSVMHEALHNHYTQKSLSLSPGK

SEQ ID NO: 300 - DNA, 1416 bp, Artificial Sequence
  Synthetic
atggacatgagggtgcccgctcagctcctggggctcctgctgctgtggctgagaggtgcgcgctgtgaggtgcagctgttggagtctgggggaggcttggtacagcctggggggtccctgagactctcctgtgcagcctctggattcacctttagcagctatgccatgacctgggtccgccaggctccagggagggggctgcagtgggtgtcaactattagtggtagtggtagtaacacatactacgcagactccgtgaagggccggttcaccatctccagagacaattccaagaacacgctgtatctgcaaatgagcagcctgagagccgaggacacggccgtatattactgtgcgaaagaggggggcagtaaccgatacttccaccactggggccagggcaccctggtcaccatctcctcagcctccaccaagggcccatcggtcttccccctggcaccctcctccaagagcacctctgggggcacagcggccctgggctgcctggtcaaggactacttccccgaaccggtgacggtgtcgtggaactcaggcgccctgaccagcggcgtgcacaccttcccggctgtcctacagtcctcaggactctactccctcagcagcgtggtgaccgtgccctccagcagcttgggcacccagacctacatctgcaacgtgaatcacaagcccagcaacaccaaggtggacaagaaagttgagcccaaatcttgtgacaaaactcacacatgcccaccgtgcccagcacctgaactcctggggggaccgtcagtcttcctcttccccccaaaacccaaggacaccctcatgatctcccggacccctgaggtcacatgcgtggtggtggacgtgagccacgaagaccctgaggtcaagttcaactggtacgtggacggcgtggaggtgcataatgccaagacaaagccgtgcgaggagcagtacggcagcacgtaccgttgcgtcagcgtcctcaccgtcctgcaccaggactggctgaatggcaaggagtacaagtgcaaggtgtccaacaaagccctcccagcccccatcgagaaaaccatctccaaagccaaagggcagccccgagaaccacaggtgtacaccctgcccccatcccgggaggagatgaccaagaaccaggtcagcctgacctgcctggtcaaaggcttctatcccagcgacatcgccgtggagtgggagagcaatgggcagccggagaacaactacaagaccacgcctcccgtgctggactccgacggctccttcttcctctatagcaagctcaccgtggacaagagcaggtggcagcaggggaacgtcttctcatgctccgtgatgcatgaggctctgcacaaccactacacgcagaagagcctctccctgtctccgggcaaatag

SEQ ID NO: 301 - protein, 452 aa, Artificial Sequence
  Synthetic
QVQLVQSGAEVTKPGASVKVSCKASGYTFTRYDINWVRQATGQGLEWMGWMNPNSGNSGSVQKFRGRVTMTRDTSITTVYMELSSLRSDDTAVYYCARGGISSSWHWAFDIWGQGTMVTVSSASTKGPSVFPLAPSSKSTSGGTAALGCLVKDYFPEPVTVSWNSGALTSGVHTFPAVLQSSGLYSLSSVVTVPSSSLGTQTYICNVNHKPSNTKVDKKVEPKSCDKTHTCPPCPAPELLGGPSVFLFPPKPKDTLMISRTPEVTCVVVDVSHEDPEVKFNWYVDGVEVHNAKTKPCEEQYGSTYRCVSVLTVLHQDWLNGKEYKCKVSNKALPAPIEKTISKAKGQPREPQVYTLPPSREEMTKNQVSLTCLVKGFYPSDIAVEWESNGQPENNYKTTPPVLDSDGSFFLYSKLTVDKSRWQQGNVFSCSVMHEALHNHYTQKSLSLSPGK

SEQ ID NO: 302 - DNA, 1425 bp, Artificial Sequence
  Synthetic
atggacatgagggtgcccgctcagctcctggggctcctgctgctgtggctgagaggtgcgcgctgtcaggtgcaactggtgcagtctggggctgaggtgacgaagcctggggcctcagtgaaggtgtcctgcaaggcttctggatacaccttcaccagatatgatatcaactgggtgcgacaggccactggacaagggcttgagtggatgggatggatgaaccctaacagtggtaattcaggctctgtacagaaattccggggcagagtcaccatgaccagggacacctccatcaccacagtctatatggaactgagcagcctgagatctgatgacacggccgtgtattactgtgcgagaggaggaattagcagcagctggcactgggcttttgatatctggggccaagggacaatggtcaccgtgtcttcagcctccaccaagggcccatcggtcttccccctggcaccctcctccaagagcacctctgggggcacagcggccctgggctgcctggtcaaggactacttccccgaaccggtgacggtgtcgtggaactcaggcgccctgaccagcggcgtgcacaccttcccggctgtcctacagtcctcaggactctactccctcagcagcgtggtgaccgtgccctccagcagcttgggcacccagacctacatctgcaacgtgaatcacaagcccagcaacaccaaggtggacaagaaagttgagcccaaatcttgtgacaaaactcacacatgcccaccgtgcccagcacctgaactcctggggggaccgtcagtcttcctcttccccccaaaacccaaggacaccctcatgatctcccggacccctgaggtcacatgcgtggtggtggacgtgagccacgaagaccctgaggtcaagttcaactggtacgtggacggcgtggaggtgcataatgccaagacaaagccgtgcgaggagcagtacggcagcacgtaccgttgcgtcagcgtcctcaccgtcctgcaccaggactggctgaatggcaaggagtacaagtgcaaggtgtccaacaaagccctcccagcccccatcgagaaaaccatctccaaagccaaagggcagccccgagaaccacaggtgtacaccctgcccccatcccgggaggagatgaccaagaaccaggtcagcctgacctgcctggtcaaaggcttctatcccagcgacatcgccgtggagtgggagagcaatgggcagccggagaacaactacaagaccacgcctcccgtgctggactccgacggctccttcttcctctatagcaagctcaccgtggacaagagcaggtggcagcaggggaacgtcttctcatgctccgtgatgcatgaggctctgcacaaccactacacgcagaagagcctctccctgtctccgggcaaatag

SEQ ID NO: 303 - protein, 453 aa, Artificial Sequence
  Synthetic
QVQLVQSGAEVKKPGASVKVSCKASGYTFTSYDINWVRQATGQGLEWMGWMNPNSGNSGSVKKFRDRVTMTRDTSISTAYMELSSLRSEDTAVYYCVRLIGYSSAWKWSFQHWGQGTLVTVSSASTKGPSVFPLAPSSKSTSGGTAALGCLVKDYFPEPVTVSWNSGALTSGVHTFPAVLQSSGLYSLSSVVTVPSSSLGTQTYICNVNHKPSNTKVDKKVEPKSCDKTHTCPPCPAPELLGGPSVFLFPPKPKDTLMISRTPEVTCVVVDVSHEDPEVKFNWYVDGVEVHNAKTKPCEEQYGSTYRCVSVLTVLHQDWLNGKEYKCKVSNKALPAPIEKTISKAKGQPREPQVYTLPPSREEMTKNQVSLTCLVKGFYPSDIAVEWESNGQPENNYKTTPPVLDSDGSFFLYSKLTVDKSRWQQGNVFSCSVMHEALHNHYTQKSLSLSPGK

SEQ ID NO: 304 - DNA, 1428 bp, Artificial Sequence
  Synthetic
atggacatgagggtgcccgctcagctcctggggctcctgctgctgtggctgagaggtgcgcgctgtcaggtgcagctggtgcagtctggggctgaggtgaagaagcctggggcctcagtgaaggtgtcctgcaaggcttctggatacaccttcaccagttatgatatcaattgggtgcgacaggccactggacaagggcttgagtggatgggatggatgaaccctaacagtggtaactcaggctctgtaaagaagttccgggacagagtcaccatgaccagggacacctccatcagcactgcctacatggaattgagcagcctgagatctgaggacacggccgtgtattactgtgtgagacttatcgggtatagcagtgcctggaagtggtccttccagcactggggccagggcaccctggtcaccgtgtcctcagcctccaccaagggcccatcggtcttccccctggcaccctcctccaagagcacctctgggggcacagcggccctgggctgcctggtcaaggactacttccccgaaccggtgacggtgtcgtggaactcaggcgccctgaccagcggcgtgcacaccttcccggctgtcctacagtcctcaggactctactccctcagcagcgtggtgaccgtgccctccagcagcttgggcacccagacctacatctgcaacgtgaatcacaagcccagcaacaccaaggtggacaagaaagttgagcccaaatcttgtgacaaaactcacacatgcccaccgtgcccagcacctgaactcctggggggaccgtcagtcttcctcttccccccaaaacccaaggacaccctcatgatctcccggacccctgaggtcacatgcgtggtggtggacgtgagccacgaagaccctgaggtcaagttcaactggtacgtggacggcgtggaggtgcataatgccaagacaaagccgtgcgaggagcagtacggcagcacgtaccgttgcgtcagcgtcctcaccgtcctgcaccaggactggctgaatggcaaggagtacaagtgcaaggtgtccaacaaagccctcccagcccccatcgagaaaaccatctccaaagccaaagggcagccccgagaaccacaggtgtacaccctgcccccatcccgggaggagatgaccaagaaccaggtcagcctgacctgcctggtcaaaggcttctatcccagcgacatcgccgtggagtgggagagcaatgggcagccggagaacaactacaagaccacgcctcccgtgctggactccgacggctccttcttcctctatagcaagctcaccgtggacaagagcaggtggcagcaggggaacgtcttctcatgctccgtgatgcatgaggctctgcacaaccactacacgcagaagagcctctccctgtctccgggcaaatag

SEQ ID NO: 305 - protein, 452 aa, Artificial Sequence
  Synthetic
QVQLVQSGAEVKKPGASVKVSCKASGYTFTSYDINWVRQATGQGLEWMGRMNPKSGNAGYVQNFRGRVTMTRDTSISTAYMELSSLRSEDTAVYYCARGGRTSIWSFVFDYWGQGTLVTVSSASTKGPSVFPLAPSSKSTSGGTAALGCLVKDYFPEPVTVSWNSGALTSGVHTFPAVLQSSGLYSLSSVVTVPSSSLGTQTYICNVNHKPSNTKVDKKVEPKSCDKTHTCPPCPAPELLGGPSVFLFPPKPKDTLMISRTPEVTCVVVDVSHEDPEVKFNWYVDGVEVHNAKTKPCEEQYGSTYRCVSVLTVLHQDWLNGKEYKCKVSNKALPAPIEKTISKAKGQPREPQVYTLPPSREEMTKNQVSLTCLVKGFYPSDIAVEWESNGQPENNYKTTPPVLDSDGSFFLYSKLTVDKSRWQQGNVFSCSVMHEALHNHYTQKSLSLSPGK

SEQ ID NO: 306 - DNA, 1425 bp, Artificial Sequence
  Synthetic
atggacatgagggtgcccgctcagctcctggggctcctgctgctgtggctgagaggtgcgcgctgtcaggtgcagctggtgcagtctggggctgaggtgaagaagcctggggcctcagtgaaggtgtcctgcaaggcttctggatacaccttcaccagttatgatatcaactgggtgcgacaggccactggacaagggcttgagtggatgggaaggatgaaccctaagagtggtaatgcaggctatgtacagaacttccggggcagagtcaccatgaccagggacacctccatcagcacagcctacatggagctgagcagcctgagatctgaggacacggccgtgtattactgtgcgagaggcgggcgtaccagcatctggtccttcgtctttgattactggggccagggcaccctggtcaccgtgtcctcagcctccaccaagggcccatcggtcttccccctggcaccctcctccaagagcacctctgggggcacagcggccctgggctgcctggtcaaggactacttccccgaaccggtgacggtgtcgtggaactcaggcgccctgaccagcggcgtgcacaccttcccggctgtcctacagtcctcaggactctactccctcagcagcgtggtgaccgtgccctccagcagcttgggcacccagacctacatctgcaacgtgaatcacaagcccagcaacaccaaggtggacaagaaagttgagcccaaatcttgtgacaaaactcacacatgcccaccgtgcccagcacctgaactcctggggggaccgtcagtcttcctcttccccccaaaacccaaggacaccctcatgatctcccggacccctgaggtcacatgcgtggtggtggacgtgagccacgaagaccctgaggtcaagttcaactggtacgtggacggcgtggaggtgcataatgccaagacaaagccgtgcgaggagcagtacggcagcacgtaccgttgcgtcagcgtcctcaccgtcctgcaccaggactggctgaatggcaaggagtacaagtgcaaggtgtccaacaaagccctcccagcccccatcgagaaaaccatctccaaagccaaagggcagccccgagaaccacaggtgtacaccctgcccccatcccgggaggagatgaccaagaaccaggtcagcctgacctgcctggtcaaaggcttctatcccagcgacatcgccgtggagtgggagagcaatgggcagccggagaacaactacaagaccacgcctcccgtgctggactccgacggctccttcttcctctatagcaagctcaccgtggacaagagcaggtggcagcaggggaacgtcttctcatgctccgtgatgcatgaggctctgcacaaccactacacgcagaagagcctctccctgtctccgggcaaatag

SEQ ID NO: 307 - protein, 454 aa, Artificial Sequence
  Synthetic
QVQLVQSGAEVKKPGASVKVSCKASGYTFTSYDINWVRQATGQGLEWMGWMNPNRGNTGYVKKFQGRVTMTRDTSISTAYMELSSLRSEDTAVYYCARRRAVYRSSWEWYFDLWGRGTLVTVSSASTKGPSVFPLAPSSKSTSGGTAALGCLVKDYFPEPVTVSWNSGALTSGVHTFPAVLQSSGLYSLSSVVTVPSSSLGTQTYICNVNHKPSNTKVDKKVEPKSCDKTHTCPPCPAPELLGGPSVFLFPPKPKDTLMISRTPEVTCVVVDVSHEDPEVKFNWYVDGVEVHNAKTKPCEEQYGSTYRCVSVLTVLHQDWLNGKEYKCKVSNKALPAPIEKTISKAKGQPREPQVYTLPPSREEMTKNQVSLTCLVKGFYPSDIAVEWESNGQPENNYKTTPPVLDSDGSFFLYSKLTVDKSRWQQGNVFSCSVMHEALHNHYTQKSLSLSPGK

SEQ ID NO: 308 - DNA, 1431 bp, Artificial Sequence
  Synthetic
atggacatgagggtgcccgctcagctcctggggctcctgctgctgtggctgagaggtgcgcgctgtcaggtgcagctggtgcagtctggggctgaggtgaagaagcctggggcctcagtgaaggtgtcctgcaaggcttctggatacaccttcaccagttatgatatcaactgggtgcgacaggccactggacaagggcttgagtggatgggatggatgaaccctaacaggggtaacacaggctatgtaaagaagttccagggcagagtcaccatgaccagggacacctccatcagcacagcctacatggagctgagtagtctgagatctgaggacacggccgtgtattactgtgcgagaaggagggccgtgtatcgcagcagctgggagtggtacttcgatctctggggccgtggcaccctggtcactgtctcctcagcctccaccaagggcccatcggtcttccccctggcaccctcctccaagagcacctctgggggcacagcggccctgggctgcctggtcaaggactacttccccgaaccggtgacggtgtcgtggaactcaggcgccctgaccagcggcgtgcacaccttcccggctgtcctacagtcctcaggactctactccctcagcagcgtggtgaccgtgccctccagcagcttgggcacccagacctacatctgcaacgtgaatcacaagcccagcaacaccaaggtggacaagaaagttgagcccaaatcttgtgacaaaactcacacatgcccaccgtgcccagcacctgaactcctggggggaccgtcagtcttcctcttccccccaaaacccaaggacaccctcatgatctcccggacccctgaggtcacatgcgtggtggtggacgtgagccacgaagaccctgaggtcaagttcaactggtacgtggacggcgtggaggtgcataatgccaagacaaagccgtgcgaggagcagtacggcagcacgtaccgttgcgtcagcgtcctcaccgtcctgcaccaggactggctgaatggcaaggagtacaagtgcaaggtgtccaacaaagccctcccagcccccatcgagaaaaccatctccaaagccaaagggcagccccgagaaccacaggtgtacaccctgcccccatcccgggaggagatgaccaagaaccaggtcagcctgacctgcctggtcaaaggcttctatcccagcgacatcgccgtggagtgggagagcaatgggcagccggagaacaactacaagaccacgcctcccgtgctggactccgacggctccttcttcctctatagcaagctcaccgtggacaagagcaggtggcagcaggggaacgtcttctcatgctccgtgatgcatgaggctctgcacaaccactacacgcagaagagcctctccctgtctccgggcaaatag

SEQ ID NO: 309 - protein, 452 aa, Artificial Sequence
  Synthetic
QVQLVQSGAEVKKPGASVKVSCKASGYTFTGYYMHWVRQAPGQGLEWMGWFKPNSGVTNYAQKFQGRVTMSRDTSISTAYMELSSLRSDDTAVYYCARAGYSTSWKDWFDPWGQGTLVTVSSASTKGPSVFPLAPSSKSTSGGTAALGCLVKDYFPEPVTVSWNSGALTSGVHTFPAVLQSSGLYSLSSVVTVPSSSLGTQTYICNVNHKPSNTKVDKKVEPKSCDKTHTCPPCPAPELLGGPSVFLFPPKPKDTLMISRTPEVTCVVVDVSHEDPEVKFNWYVDGVEVHNAKTKPCEEQYGSTYRCVSVLTVLHQDWLNGKEYKCKVSNKALPAPIEKTISKAKGQPREPQVYTLPPSREEMTKNQVSLTCLVKGFYPSDIAVEWESNGQPENNYKTTPPVLDSDGSFFLYSKLTVDKSRWQQGNVFSCSVMHEALHNHYTQKSLSLSPGK

SEQ ID NO: 310 - DNA, 1425 bp, Artificial Sequence
  Synthetic
atggacatgagggtgcccgctcagctcctggggctcctgctgctgtggctgagaggtgcgcgctgtcaggtgcagctggtgcagtctggggctgaggtgaagaagcctggggcctcagtgaaggtgtcctgcaaggcttctggatacaccttcaccggctactatatgcactgggtgcgacaggcccctggacaagggcttgagtggatgggatggttcaaacctaatagtggtgtcacaaactatgcacagaagtttcagggcagggtcaccatgagcagggacacgtccatcagcacagcctacatggagctgagcagcctgagatctgacgacacggccgtgtattactgtgcgagagccggatacagcaccagttggaaagactggttcgacccctggggccagggaaccctggtcaccgtgtcttcagcctccaccaagggcccatcggtcttccccctggcaccctcctccaagagcacctctgggggcacagcggccctgggctgcctggtcaaggactacttccccgaaccggtgacggtgtcgtggaactcaggcgccctgaccagcggcgtgcacaccttcccggctgtcctacagtcctcaggactctactccctcagcagcgtggtgaccgtgccctccagcagcttgggcacccagacctacatctgcaacgtgaatcacaagcccagcaacaccaaggtggacaagaaagttgagcccaaatcttgtgacaaaactcacacatgcccaccgtgcccagcacctgaactcctggggggaccgtcagtcttcctcttccccccaaaacccaaggacaccctcatgatctcccggacccctgaggtcacatgcgtggtggtggacgtgagccacgaagaccctgaggtcaagttcaactggtacgtggacggcgtggaggtgcataatgccaagacaaagccgtgcgaggagcagtacggcagcacgtaccgttgcgtcagcgtcctcaccgtcctgcaccaggactggctgaatggcaaggagtacaagtgcaaggtgtccaacaaagccctcccagcccccatcgagaaaaccatctccaaagccaaagggcagccccgagaaccacaggtgtacaccctgcccccatcccgggaggagatgaccaagaaccaggtcagcctgacctgcctggtcaaaggcttctatcccagcgacatcgccgtggagtgggagagcaatgggcagccggagaacaactacaagaccacgcctcccgtgctggactccgacggctccttcttcctctatagcaagctcaccgtggacaagagcaggtggcagcaggggaacgtcttctcatgctccgtgatgcatgaggctctgcacaaccactacacgcagaagagcctctccctgtctccgggcaaatag

SEQ ID NO: 311 - protein, 452 aa, Artificial Sequence; identical to SEQ ID NO: 285
  Synthetic

SEQ ID NO: 312 - DNA, 1425 bp, Artificial Sequence; identical to SEQ ID NO: 286
  Synthetic

SEQ ID NO: 313 - protein, 449 aa, Artificial Sequence; identical to SEQ ID NO: 289
  Synthetic

SEQ ID NO: 314 - DNA, 1416 bp, Artificial Sequence; identical to SEQ ID NO: 290
  Synthetic

SEQ ID NO: 315 - protein, 447 aa, Artificial Sequence; identical to SEQ ID NO: 295
  Synthetic

SEQ ID NO: 316 - DNA, 1410 bp, Artificial Sequence; identical to SEQ ID NO: 296
  Synthetic

SEQ ID NO: 317 - protein, 452 aa, Artificial Sequence; identical to SEQ ID NO: 297
  Synthetic

SEQ ID NO: 318 - DNA, 1425 bp, Artificial Sequence; identical to SEQ ID NO: 298
  Synthetic

SEQ ID NO: 319 - protein, 453 aa, Artificial Sequence; identical to SEQ ID NO: 303
  Synthetic

SEQ ID NO: 320 - DNA, 1428 bp, Artificial Sequence; identical to SEQ ID NO: 304
  Synthetic

SEQ ID NO: 321 - protein, 454 aa, Artificial Sequence; identical to SEQ ID NO: 307
  Synthetic

SEQ ID NO: 322 - DNA, 1431 bp, Artificial Sequence; identical to SEQ ID NO: 308
  Synthetic

SEQ ID NO: 323 - protein, 452 aa, Artificial Sequence; identical to SEQ ID NO: 309
  Synthetic

SEQ ID NO: 324 - DNA, 1425 bp, Artificial Sequence; identical to SEQ ID NO: 310
  Synthetic

SEQ ID NO: 325 - protein, 452 aa, Artificial Sequence
  Synthetic
QVQLVQSGAEVKKPGASVKVSCKASGYTFTRYDINWVRQATGQGLEWMGWLNPNSGNTGQTQKFRGRVTMTRDTSISTAYMELSSLRSEDTAVYYCARGGYTSAWRWYFDLWGRGTLVTVSSASTKGPSVFPLAPSSKSTSGGTAALGCLVKDYFPEPVTVSWNSGALTSGVHTFPAVLQSSGLYSLSSVVTVPSSSLGTQTYICNVNHKPSNTKVDKKVEPKSCDKTHTCPPCPAPELLGGPSVFLFPPKPKDTLMISRTPEVTCVVVDVSHEDPEVKFNWYVDGVEVHNAKTKPCEEQYGSTYRCVSVLTVLHQDWLNGKEYKCKVSNKALPAPIEKTISKAKGQPREPQVYTLPPSREEMTKNQVSLTCLVKGFYPSDIAVEWESNGQPENNYKTTPPVLDSDGSFFLYSKLTVDKSRWQQGNVFSCSVMHEALHNHYTQKSLSLSPGK

SEQ ID NO: 326 - DNA, 1425 bp, Artificial Sequence
  Synthetic
atggacatgagggtgcccgctcagctcctggggctcctgctgctgtggctgagaggtgcgcgctgtcaggtgcagctggtgcagtctggggctgaggtgaagaagcctggggcctcagtgaaggtgtcctgcaaggcttctggatacaccttcacccgttatgatatcaactgggtgcgacaggccactggacaagggcttgagtggatgggatggctgaaccctaatagtggtaacacaggccagacacagaagttccggggcagagtcaccatgaccagggacacctccatctctacagcctacatggagctgagcagcctgagatctgaggacacggccgtgtattactgtgcgagaggggggtataccagtgcctggagatggtacttcgatctctggggccgtggcaccctggtcactgtctcctcagcctccaccaagggcccatcggtcttccccctggcaccctcctccaagagcacctctgggggcacagcggccctgggctgcctggtcaaggactacttccccgaaccggtgacggtgtcgtggaactcaggcgccctgaccagcggcgtgcacaccttcccggctgtcctacagtcctcaggactctactccctcagcagcgtggtgaccgtgccctccagcagcttgggcacccagacctacatctgcaacgtgaatcacaagcccagcaacaccaaggtggacaagaaagttgagcccaaatcttgtgacaaaactcacacatgcccaccgtgcccagcacctgaactcctggggggaccgtcagtcttcctcttccccccaaaacccaaggacaccctcatgatctcccggacccctgaggtcacatgcgtggtggtggacgtgagccacgaagaccctgaggtcaagttcaactggtacgtggacggcgtggaggtgcataatgccaagacaaagccgtgcgaggagcagtacggcagcacgtaccgttgcgtcagcgtcctcaccgtcctgcaccaggactggctgaatggcaaggagtacaagtgcaaggtgtccaacaaagccctcccagcccccatcgagaaaaccatctccaaagccaaagggcagccccgagaaccacaggtgtacaccctgcccccatcccgggaggagatgaccaagaaccaggtcagcctgacctgcctggtcaaaggcttctatcccagcgacatcgccgtggagtgggagagcaatgggcagccggagaacaactacaagaccacgcctcccgtgctggactccgacggctccttcttcctctatagcaagctcaccgtggacaagagcaggtggcagcaggggaacgtcttctcatgctccgtgatgcatgaggctctgcacaaccactacacgcagaagagcctctccctgtctccgggcaaatag

SEQ ID NO: 327 - protein, 452 aa, Artificial Sequence; identical to SEQ ID NO: 297
  Synthetic

SEQ ID NO: 328 - DNA, 1425 bp, Artificial Sequence; identical to SEQ ID NO: 298
  Synthetic

SEQ ID NO: 329 - protein, 452 aa, Artificial Sequence
  Synthetic
QVQLVQSGAEVKKPGASVKVSCKASGYTFTGYYMHWVRQAPGQGLEWMGWFKPNSGVTNYAQKFQGRVTMTRDTSISTAYMELSSLRSDDTAVYYCARAGYSTSYKDWFDPWGQGTLVTVSSASTKGPSVFPLAPSSKSTSGGTAALGCLVKDYFPEPVTVSWNSGALTSGVHTFPAVLQSSGLYSLSSVVTVPSSSLGTQTYICNVNHKPSNTKVDKKVEPKSCDKTHTCPPCPAPELLGGPSVFLFPPKPKDTLMISRTPEVTCVVVDVSHEDPEVKFNWYVDGVEVHNAKTKPCEEQYGSTYRCVSVLTVLHQDWLNGKEYKCKVSNKALPAPIEKTISKAKGQPREPQVYTLPPSREEMTKNQVSLTCLVKGFYPSDIAVEWESNGQPENNYKTTPPVLDSDGSFFLYSKLTVDKSRWQQGNVFSCSVMHEALHNHYTQKSLSLSPGK

SEQ ID NO: 330 - DNA, 1425 bp, Artificial Sequence
  Synthetic
atggacatgagggtgcccgctcagctcctggggctcctgctgctgtggctgagaggtgcgcgctgtcaggtgcagctggtgcagtctggggctgaggtgaagaagcctggggcctcagtgaaggtgtcctgcaaggcttctggatacaccttcaccggctactatatgcactgggtgcgacaggcccctggacaagggcttgagtggatgggatggttcaaacctaatagtggtgtcacaaactatgcacagaagtttcagggcagggtcaccatgactagggacacgtccatcagcacagcctacatggagctgagcagcctgagatctgacgacacggccgtgtattactgtgcgagagccggatacagcaccagttataaagactggttcgacccctggggccagggaaccctggtcaccgtgtcttcagcctccaccaagggcccatcggtcttccccctggcaccctcctccaagagcacctctgggggcacagcggccctgggctgcctggtcaaggactacttccccgaaccggtgacggtgtcgtggaactcaggcgccctgaccagcggcgtgcacaccttcccggctgtcctacagtcctcaggactctactccctcagcagcgtggtgaccgtgccctccagcagcttgggcacccagacctacatctgcaacgtgaatcacaagcccagcaacaccaaggtggacaagaaagttgagcccaaatcttgtgacaaaactcacacatgcccaccgtgcccagcacctgaactcctggggggaccgtcagtcttcctcttccccccaaaacccaaggacaccctcatgatctcccggacccctgaggtcacatgcgtggtggtggacgtgagccacgaagaccctgaggtcaagttcaactggtacgtggacggcgtggaggtgcataatgccaagacaaagccgtgcgaggagcagtacggcagcacgtaccgttgcgtcagcgtcctcaccgtcctgcaccaggactggctgaatggcaaggagtacaagtgcaaggtgtccaacaaagccctcccagcccccatcgagaaaaccatctccaaagccaaagggcagccccgagaaccacaggtgtacaccctgcccccatcccgggaggagatgaccaagaaccaggtcagcctgacctgcctggtcaaaggcttctatcccagcgacatcgccgtggagtgggagagcaatgggcagccggagaacaactacaagaccacgcctcccgtgctggactccgacggctccttcttcctctatagcaagctcaccgtggacaagagcaggtggcagcaggggaacgtcttctcatgctccgtgatgcatgaggctctgcacaaccactacacgcagaagagcctctccctgtctccgggcaaatag

SEQ ID NO: 331 - protein, 452 aa, Artificial Sequence
  Synthetic
QVQLVQSGAEVKKPGASVKVSCKASGYTFTGYYMHWVRQAPGQGLEWMGWFKPNSGVTNYAQKFQGRVTMTRDTSISTAYMELSSLRSDDTAVYYCARAGYSTSHKDWFDPWGQGTLVTVSSASTKGPSVFPLAPSSKSTSGGTAALGCLVKDYFPEPVTVSWNSGALTSGVHTFPAVLQSSGLYSLSSVVTVPSSSLGTQTYICNVNHKPSNTKVDKKVEPKSCDKTHTCPPCPAPELLGGPSVFLFPPKPKDTLMISRTPEVTCVVVDVSHEDPEVKFNWYVDGVEVHNAKTKPCEEQYGSTYRCVSVLTVLHQDWLNGKEYKCKVSNKALPAPIEKTISKAKGQPREPQVYTLPPSREEMTKNQVSLTCLVKGFYPSDIAVEWESNGQPENNYKTTPPVLDSDGSFFLYSKLTVDKSRWQQGNVFSCSVMHEALHNHYTQKSLSLSPGK

SEQ ID NO: 332 - DNA, 1425 bp, Artificial Sequence
  Synthetic
atggacatgagggtgcccgctcagctcctggggctcctgctgctgtggctgagaggtgcgcgctgtcaggtgcagctggtgcagtctggggctgaggtgaagaagcctggggcctcagtgaaggtgtcctgcaaggcttctggatacaccttcaccggctactatatgcactgggtgcgacaggcccctggacaagggcttgagtggatgggatggttcaaacctaatagtggtgtcacaaactatgcacagaagtttcagggcagggtcaccatgactagggacacgtccatcagcacagcctacatggagctgagcagcctgagatctgacgacacggccgtgtattactgtgcgagagccggatacagcaccagtcataaagactggttcgacccctggggccagggaaccctggtcaccgtgtcttcagcctccaccaagggcccatcggtcttccccctggcaccctcctccaagagcacctctgggggcacagcggccctgggctgcctggtcaaggactacttccccgaaccggtgacggtgtcgtggaactcaggcgccctgaccagcggcgtgcacaccttcccggctgtcctacagtcctcaggactctactccctcagcagcgtggtgaccgtgccctccagcagcttgggcacccagacctacatctgcaacgtgaatcacaagcccagcaacaccaaggtggacaagaaagttgagcccaaatcttgtgacaaaactcacacatgcccaccgtgcccagcacctgaactcctggggggaccgtcagtcttcctcttccccccaaaacccaaggacaccctcatgatctcccggacccctgaggtcacatgcgtggtggtggacgtgagccacgaagaccctgaggtcaagttcaactggtacgtggacggcgtggaggtgcataatgccaagacaaagccgtgcgaggagcagtacggcagcacgtaccgttgcgtcagcgtcctcaccgtcctgcaccaggactggctgaatggcaaggagtacaagtgcaaggtgtccaacaaagccctcccagcccccatcgagaaaaccatctccaaagccaaagggcagccccgagaaccacaggtgtacaccctgcccccatcccgggaggagatgaccaagaaccaggtcagcctgacctgcctggtcaaaggcttctatcccagcgacatcgccgtggagtgggagagcaatgggcagccggagaacaactacaagaccacgcctcccgtgctggactccgacggctccttcttcctctatagcaagctcaccgtggacaagagcaggtggcagcaggggaacgtcttctcatgctccgtgatgcatgaggctctgcacaaccactacacgcagaagagcctctccctgtctccgggcaaatag

SEQ ID NO: 333 - protein, 452 aa, Artificial Sequence
  Synthetic
QVQLVQSGAEVKKPGASVKVSCKASGYTFTGYYMHWVRQAPGQGLEWMGWFKPNSGVTNYAQKFQGRVTMTRDTSISTAYMELSSLRSDDTAVYYCARAGYSTSFKDWFDPWGQGTLVTVSSASTKGPSVFPLAPSSKSTSGGTAALGCLVKDYFPEPVTVSWNSGALTSGVHTFPAVLQSSGLYSLSSVVTVPSSSLGTQTYICNVNHKPSNTKVDKKVEPKSCDKTHTCPPCPAPELLGGPSVFLFPPKPKDTLMISRTPEVTCVVVDVSHEDPEVKFNWYVDGVEVHNAKTKPCEEQYGSTYRCVSVLTVLHQDWLNGKEYKCKVSNKALPAPIEKTISKAKGQPREPQVYTLPPSREEMTKNQVSLTCLVKGFYPSDIAVEWESNGQPENNYKTTPPVLDSDGSFFLYSKLTVDKSRWQQGNVFSCSVMHEALHNHYTQKSLSLSPGK

SEQ ID NO: 334 - DNA, 1425 bp, Artificial Sequence
  Synthetic
atggacatgagggtgcccgctcagctcctggggctcctgctgctgtggctgagaggtgcgcgctgtcaggtgcagctggtgcagtctggggctgaggtgaagaagcctggggcctcagtgaaggtgtcctgcaaggcttctggatacaccttcaccggctactatatgcactgggtgcgacaggcccctggacaagggcttgagtggatgggatggttcaaacctaatagtggtgtcacaaactatgcacagaagtttcagggcagggtcaccatgactagggacacgtccatcagcacagcctacatggagctgagcagcctgagatctgacgacacggccgtgtattactgtgcgagagccggatacagcaccagttttaaagactggttcgacccctggggccagggaaccctggtcaccgtgtcttcagcctccaccaagggcccatcggtcttccccctggcaccctcctccaagagcacctctgggggcacagcggccctgggctgcctggtcaaggactacttccccgaaccggtgacggtgtcgtggaactcaggcgccctgaccagcggcgtgcacaccttcccggctgtcctacagtcctcaggactctactccctcagcagcgtggtgaccgtgccctccagcagcttgggcacccagacctacatctgcaacgtgaatcacaagcccagcaacaccaaggtggacaagaaagttgagcccaaatcttgtgacaaaactcacacatgcccaccgtgcccagcacctgaactcctggggggaccgtcagtcttcctcttccccccaaaacccaaggacaccctcatgatctcccggacccctgaggtcacatgcgtggtggtggacgtgagccacgaagaccctgaggtcaagttcaactggtacgtggacggcgtggaggtgcataatgccaagacaaagccgtgcgaggagcagtacggcagcacgtaccgttgcgtcagcgtcctcaccgtcctgcaccaggactggctgaatggcaaggagtacaagtgcaaggtgtccaacaaagccctcccagcccccatcgagaaaaccatctccaaagccaaagggcagccccgagaaccacaggtgtacaccctgcccccatcccgggaggagatgaccaagaaccaggtcagcctgacctgcctggtcaaaggcttctatcccagcgacatcgccgtggagtgggagagcaatgggcagccggagaacaactacaagaccacgcctcccgtgctggactccgacggctccttcttcctctatagcaagctcaccgtggacaagagcaggtggcagcaggggaacgtcttctcatgctccgtgatgcatgaggctctgcacaaccactacacgcagaagagcctctccctgtctccgggcaaatag

SEQ ID NO: 335 - protein, 452 aa, Artificial Sequence
  Synthetic
QVQLVQSGAEVKKPGASVKVSCKASGYTFTGYYMHWVRQAPGQGLEWMGWFKPNSGVTNYAQKFQGRVTMTRDTSISTAYMELSSLRSDDTAVYYCARAGYSTSWKDWFDPWGQGTLVTVSSASTKGPSVFPLAPSSKSTSGGTAALGCLVKDYFPEPVTVSWNSGALTSGVHTFPAVLQSSGLYSLSSVVTVPSSSLGTQTYICNVNHKPSNTKVDKKVEPKSCDKTHTCPPCPAPELLGGPSVFLFPPKPKDTLMISRTPEVTCVVVDVSHEDPEVKFNWYVDGVEVHNAKTKPCEEQYGSTYRCVSVLTVLHQDWLNGKEYKCKVSNKALPAPIEKTISKAKGQPREPQVYTLPPSREEMTKNQVSLTCLVKGFYPSDIAVEWESNGQPENNYKTTPPVLDSDGSFFLYSKLTVDKSRWQQGNVFSCSVMHEALHNHYTQKSLSLSPGK

SEQ ID NO: 336 - DNA, 1425 bp, Artificial Sequence
  Synthetic
atggacatgagggtgcccgctcagctcctggggctcctgctgctgtggctgagaggtgcgcgctgtcaggtgcagctggtgcagtctggggctgaggtgaagaagcctggggcctcagtgaaggtgtcctgcaaggcttctggatacaccttcaccggctactatatgcactgggtgcgacaggcccctggacaagggcttgagtggatgggatggttcaaacctaatagtggtgtcacaaactatgcacagaagtttcagggcagggtcaccatgactagggacacgtccatcagcacagcctacatggagctgagcagcctgagatctgacgacacggccgtgtattactgtgcgagagccggatacagcaccagttggaaagactggttcgacccctggggccagggaaccctggtcaccgtgtcttcagcctccaccaagggcccatcggtcttccccctggcaccctcctccaagagcacctctgggggcacagcggccctgggctgcctggtcaaggactacttccccgaaccggtgacggtgtcgtggaactcaggcgccctgaccagcggcgtgcacaccttcccggctgtcctacagtcctcaggactctactccctcagcagcgtggtgaccgtgccctccagcagcttgggcacccagacctacatctgcaacgtgaatcacaagcccagcaacaccaaggtggacaagaaagttgagcccaaatcttgtgacaaaactcacacatgcccaccgtgcccagcacctgaactcctggggggaccgtcagtcttcctcttccccccaaaacccaaggacaccctcatgatctcccggacccctgaggtcacatgcgtggtggtggacgtgagccacgaagaccctgaggtcaagttcaactggtacgtggacggcgtggaggtgcataatgccaagacaaagccgtgcgaggagcagtacggcagcacgtaccgttgcgtcagcgtcctcaccgtcctgcaccaggactggctgaatggcaaggagtacaagtgcaaggtgtccaacaaagccctcccagcccccatcgagaaaaccatctccaaagccaaagggcagccccgagaaccacaggtgtacaccctgcccccatcccgggaggagatgaccaagaaccaggtcagcctgacctgcctggtcaaaggcttctatcccagcgacatcgccgtggagtgggagagcaatgggcagccggagaacaactacaagaccacgcctcccgtgctggactccgacggctccttcttcctctatagcaagctcaccgtggacaagagcaggtggcagcaggggaacgtcttctcatgctccgtgatgcatgaggctctgcacaaccactacacgcagaagagcctctccctgtctccgggcaaatag

SEQ ID NO: 337 - protein, 452 aa, Artificial Sequence; identical to SEQ ID NO: 335
  Synthetic

SEQ ID NO: 338 - DNA, 1425 bp, Artificial Sequence; identical to SEQ ID NO: 336
  Synthetic

SEQ ID NO: 339 - protein, 454 aa, Artificial Sequence; identical to SEQ ID NO: 307
  Synthetic

SEQ ID NO: 340 - DNA, 1431 bp, Artificial Sequence; identical to SEQ ID NO: 308
  Synthetic

SEQ ID NO: 341 - protein, 454 aa, Artificial Sequence; identical to SEQ ID NO: 307
  Synthetic

SEQ ID NO: 342 - DNA, 1431 bp, Artificial Sequence; identical to SEQ ID NO: 308
  Synthetic

SEQ ID NO: 343 - protein, 454 aa, Artificial Sequence; identical to SEQ ID NO: 307
  Synthetic

SEQ ID NO: 344 - DNA, 1431 bp, Artificial Sequence; identical to SEQ ID NO: 308
  Synthetic

SEQ ID NO: 345 - protein, 453 aa, Artificial Sequence
  Synthetic
QVQLVQSGAEVKKPGASVKVSCKASGYTFTSYDINWVRQATGQGLEWMGWMNPNSGNSGSVKKFRDRVTMTRDTSISTAYMELSSLRSEDTAVYYCVRLIGYSSAYKWSFQHWGQGTLVTVSSASTKGPSVFPLAPSSKSTSGGTAALGCLVKDYFPEPVTVSWNSGALTSGVHTFPAVLQSSGLYSLSSVVTVPSSSLGTQTYICNVNHKPSNTKVDKKVEPKSCDKTHTCPPCPAPELLGGPSVFLFPPKPKDTLMISRTPEVTCVVVDVSHEDPEVKFNWYVDGVEVHNAKTKPCEEQYGSTYRCVSVLTVLHQDWLNGKEYKCKVSNKALPAPIEKTISKAKGQPREPQVYTLPPSREEMTKNQVSLTCLVKGFYPSDIAVEWESNGQPENNYKTTPPVLDSDGSFFLYSKLTVDKSRWQQGNVFSCSVMHEALHNHYTQKSLSLSPGK

SEQ ID NO: 346 - DNA, 1428 bp, Artificial Sequence
  Synthetic
atggacatgagggtgcccgctcagctcctggggctcctgctgctgtggctgagaggtgcgcgctgtcaggtgcagctggtgcagtctggggctgaggtgaagaagcctggggcctcagtgaaggtgtcctgcaaggcttctggatacaccttcaccagttatgatatcaattgggtgcgacaggccactggacaagggcttgagtggatgggatggatgaaccctaacagtggtaactcaggctctgtaaagaagttccgggacagagtcaccatgaccagggacacctccatcagcactgcctacatggaattgagcagcctgagatctgaggacacggccgtgtattactgtgtgagacttatcgggtatagcagtgcctataagtggtccttccagcactggggccagggcaccctggtcaccgtgtcctcagcctccaccaagggcccatcggtcttccccctggcaccctcctccaagagcacctctgggggcacagcggccctgggctgcctggtcaaggactacttccccgaaccggtgacggtgtcgtggaactcaggcgccctgaccagcggcgtgcacaccttcccggctgtcctacagtcctcaggactctactccctcagcagcgtggtgaccgtgccctccagcagcttgggcacccagacctacatctgcaacgtgaatcacaagcccagcaacaccaaggtggacaagaaagttgagcccaaatcttgtgacaaaactcacacatgcccaccgtgcccagcacctgaactcctggggggaccgtcagtcttcctcttccccccaaaacccaaggacaccctcatgatctcccggacccctgaggtcacatgcgtggtggtggacgtgagccacgaagaccctgaggtcaagttcaactggtacgtggacggcgtggaggtgcataatgccaagacaaagccgtgcgaggagcagtacggcagcacgtaccgttgcgtcagcgtcctcaccgtcctgcaccaggactggctgaatggcaaggagtacaagtgcaaggtgtccaacaaagccctcccagcccccatcgagaaaaccatctccaaagccaaagggcagccccgagaaccacaggtgtacaccctgcccccatcccgggaggagatgaccaagaaccaggtcagcctgacctgcctggtcaaaggcttctatcccagcgacatcgccgtggagtgggagagcaatgggcagccggagaacaactacaagaccacgcctcccgtgctggactccgacggctccttcttcctctatagcaagctcaccgtggacaagagcaggtggcagcaggggaacgtcttctcatgctccgtgatgcatgaggctctgcacaaccactacacgcagaagagcctctccctgtctccgggcaaatag

SEQ ID NO: 347 - protein, 453 aa, Artificial Sequence; identical to SEQ ID NO: 345
  Synthetic

SEQ ID NO: 348 - DNA, 1428 bp, Artificial Sequence; identical to SEQ ID NO: 346
  Synthetic

SEQ ID NO: 349 - protein, 453 aa, Artificial Sequence
  Synthetic
QVQLVQSGAEVKKPGASVKVSCKASGYTFTSYDINWVRQATGQGLEWMGWMNPNSGNSGSVKKFRDRVTMTRDTSISTAYMELSSLRSEDTAVYYCVRLIGYSSAFKWSFQHWGQGTLVTVSSASTKGPSVFPLAPSSKSTSGGTAALGCLVKDYFPEPVTVSWNSGALTSGVHTFPAVLQSSGLYSLSSVVTVPSSSLGTQTYICNVNHKPSNTKVDKKVEPKSCDKTHTCPPCPAPELLGGPSVFLFPPKPKDTLMISRTPEVTCVVVDVSHEDPEVKFNWYVDGVEVHNAKTKPCEEQYGSTYRCVSVLTVLHQDWLNGKEYKCKVSNKALPAPIEKTISKAKGQPREPQVYTLPPSREEMTKNQVSLTCLVKGFYPSDIAVEWESNGQPENNYKTTPPVLDSDGSFFLYSKLTVDKSRWQQGNVFSCSVMHEALHNHYTQKSLSLSPGK

SEQ ID NO: 350 - DNA, 1428 bp, Artificial Sequence
  Synthetic
atggacatgagggtgcccgctcagctcctggggctcctgctgctgtggctgagaggtgcgcgctgtcaggtgcagctggtgcagtctggggctgaggtgaagaagcctggggcctcagtgaaggtgtcctgcaaggcttctggatacaccttcaccagttatgatatcaattgggtgcgacaggccactggacaagggcttgagtggatgggatggatgaaccctaacagtggtaactcaggctctgtaaagaagttccgggacagagtcaccatgaccagggacacctccatcagcactgcctacatggaattgagcagcctgagatctgaggacacggccgtgtattactgtgtgagacttatcgggtatagcagtgcctttaagtggtccttccagcactggggccagggcaccctggtcaccgtgtcctcagcctccaccaagggcccatcggtcttccccctggcaccctcctccaagagcacctctgggggcacagcggccctgggctgcctggtcaaggactacttccccgaaccggtgacggtgtcgtggaactcaggcgccctgaccagcggcgtgcacaccttcccggctgtcctacagtcctcaggactctactccctcagcagcgtggtgaccgtgccctccagcagcttgggcacccagacctacatctgcaacgtgaatcacaagcccagcaacaccaaggtggacaagaaagttgagcccaaatcttgtgacaaaactcacacatgcccaccgtgcccagcacctgaactcctggggggaccgtcagtcttcctcttccccccaaaacccaaggacaccctcatgatctcccggacccctgaggtcacatgcgtggtggtggacgtgagccacgaagaccctgaggtcaagttcaactggtacgtggacggcgtggaggtgcataatgccaagacaaagccgtgcgaggagcagtacggcagcacgtaccgttgcgtcagcgtcctcaccgtcctgcaccaggactggctgaatggcaaggagtacaagtgcaaggtgtccaacaaagccctcccagcccccatcgagaaaaccatctccaaagccaaagggcagccccgagaaccacaggtgtacaccctgcccccatcccgggaggagatgaccaagaaccaggtcagcctgacctgcctggtcaaaggcttctatcccagcgacatcgccgtggagtgggagagcaatgggcagccggagaacaactacaagaccacgcctcccgtgctggactccgacggctccttcttcctctatagcaagctcaccgtggacaagagcaggtggcagcaggggaacgtcttctcatgctccgtgatgcatgaggctctgcacaaccactacacgcagaagagcctctccctgtctccgggcaaatag

SEQ ID NO: 351 - protein, 453 aa, Artificial Sequence; identical to SEQ ID NO: 349
  Synthetic

SEQ ID NO: 352 - DNA, 1428 bp, Artificial Sequence; identical to SEQ ID NO: 350
  Synthetic

SEQ ID NO: 353 - protein, 453 aa, Artificial Sequence
  Synthetic
QVQLVQSGAEVKKPGASVKVSCKASGYTFTSYDINWVRQATGQGLEWMGWMNPNSGNSGSVKKFRDRVTMTRDTSTSTAYMELSSLRSEDTAVYYCVRLIGYSSAYKWSFQHWGQGTLVTVSSASTKGPSVFPLAPSSKSTSGGTAALGCLVKDYFPEPVTVSWNSGALTSGVHTFPAVLQSSGLYSLSSVVTVPSSSLGTQTYICNVNHKPSNTKVDKKVEPKSCDKTHTCPPCPAPELLGGPSVFLFPPKPKDTLMISRTPEVTCVVVDVSHEDPEVKFNWYVDGVEVHNAKTKPCEEQYGSTYRCVSVLTVLHQDWLNGKEYKCKVSNKALPAPIEKTISKAKGQPREPQVYTLPPSREEMTKNQVSLTCLVKGFYPSDIAVEWESNGQPENNYKTTPPVLDSDGSFFLYSKLTVDKSRWQQGNVFSCSVMHEALHNHYTQKSLSLSPGK

SEQ ID NO: 354 - DNA, 1428 bp, Artificial Sequence
  Synthetic
atggacatgagggtgcccgctcagctcctggggctcctgctgctgtggctgagaggtgcgcgctgtcaggtgcagctggtgcagtctggggctgaggtgaagaagcctggggcctcagtgaaggtgtcctgcaaggcttctggatacaccttcaccagttatgatatcaattgggtgcgacaggccactggacaagggcttgagtggatgggatggatgaaccctaacagtggtaactcaggctctgtaaagaagttccgggacagagtcaccatgaccagggacacctccactagcactgcctacatggaattgagcagcctgagatctgaggacacggccgtgtattactgtgtgagacttatcgggtatagcagtgcctataagtggtccttccagcactggggccagggcaccctggtcaccgtgtcctcagcctccaccaagggcccatcggtcttccccctggcaccctcctccaagagcacctctgggggcacagcggccctgggctgcctggtcaaggactacttccccgaaccggtgacggtgtcgtggaactcaggcgccctgaccagcggcgtgcacaccttcccggctgtcctacagtcctcaggactctactccctcagcagcgtggtgaccgtgccctccagcagcttgggcacccagacctacatctgcaacgtgaatcacaagcccagcaacaccaaggtggacaagaaagttgagcccaaatcttgtgacaaaactcacacatgcccaccgtgcccagcacctgaactcctggggggaccgtcagtcttcctcttccccccaaaacccaaggacaccctcatgatctcccggacccctgaggtcacatgcgtggtggtggacgtgagccacgaagaccctgaggtcaagttcaactggtacgtggacggcgtggaggtgcataatgccaagacaaagccgtgcgaggagcagtacggcagcacgtaccgttgcgtcagcgtcctcaccgtcctgcaccaggactggctgaatggcaaggagtacaagtgcaaggtgtccaacaaagccctcccagcccccatcgagaaaaccatctccaaagccaaagggcagccccgagaaccacaggtgtacaccctgcccccatcccgggaggagatgaccaagaaccaggtcagcctgacctgcctggtcaaaggcttctatcccagcgacatcgccgtggagtgggagagcaatgggcagccggagaacaactacaagaccacgcctcccgtgctggactccgacggctccttcttcctctatagcaagctcaccgtggacaagagcaggtggcagcaggggaacgtcttctcatgctccgtgatgcatgaggctctgcacaaccactacacgcagaagagcctctccctgtctccgggcaaatag

SEQ ID NO: 355 - protein, 453 aa, Artificial Sequence
  Synthetic
QVQLVQSGAEVKKPGASVKVSCKASGYTFTSYDINWVRQATGQGLEWMGWMNPNSGNSGSVKKFRDRVTMTRDTSTSTAYMELSSLRSEDTAVYYCVRLIGYSSAWKWSFQHWGQGTLVTVSSASTKGPSVFPLAPSSKSTSGGTAALGCLVKDYFPEPVTVSWNSGALTSGVHTFPAVLQSSGLYSLSSVVTVPSSSLGTQTYICNVNHKPSNTKVDKKVEPKSCDKTHTCPPCPAPELLGGPSVFLFPPKPKDTLMISRTPEVTCVVVDVSHEDPEVKFNWYVDGVEVHNAKTKPCEEQYGSTYRCVSVLTVLHQDWLNGKEYKCKVSNKALPAPIEKTISKAKGQPREPQVYTLPPSREEMTKNQVSLTCLVKGFYPSDIAVEWESNGQPENNYKTTPPVLDSDGSFFLYSKLTVDKSRWQQGNVFSCSVMHEALHNHYTQKSLSLSPGK

SEQ ID NO: 356 - DNA, 1428 bp, Artificial Sequence
  Synthetic
atggacatgagggtgcccgctcagctcctggggctcctgctgctgtggctgagaggtgcgcgctgtcaggtgcagctggtgcagtctggggctgaggtgaagaagcctggggcctcagtgaaggtgtcctgcaaggcttctggatacaccttcaccagttatgatatcaattgggtgcgacaggccactggacaagggcttgagtggatgggatggatgaaccctaacagtggtaactcaggctctgtaaagaagttccgggacagagtcaccatgaccagggacacctccactagcactgcctacatggaattgagcagcctgagatctgaggacacggccgtgtattactgtgtgagacttatcgggtatagcagtgcctggaagtggtccttccagcactggggccagggcaccctggtcaccgtgtcctcagcctccaccaagggcccatcggtcttccccctggcaccctcctccaagagcacctctgggggcacagcggccctgggctgcctggtcaaggactacttccccgaaccggtgacggtgtcgtggaactcaggcgccctgaccagcggcgtgcacaccttcccggctgtcctacagtcctcaggactctactccctcagcagcgtggtgaccgtgccctccagcagcttgggcacccagacctacatctgcaacgtgaatcacaagcccagcaacaccaaggtggacaagaaagttgagcccaaatcttgtgacaaaactcacacatgcccaccgtgcccagcacctgaactcctggggggaccgtcagtcttcctcttccccccaaaacccaaggacaccctcatgatctcccggacccctgaggtcacatgcgtggtggtggacgtgagccacgaagaccctgaggtcaagttcaactggtacgtggacggcgtggaggtgcataatgccaagacaaagccgtgcgaggagcagtacggcagcacgtaccgttgcgtcagcgtcctcaccgtcctgcaccaggactggctgaatggcaaggagtacaagtgcaaggtgtccaacaaagccctcccagcccccatcgagaaaaccatctccaaagccaaagggcagccccgagaaccacaggtgtacaccctgcccccatcccgggaggagatgaccaagaaccaggtcagcctgacctgcctggtcaaaggcttctatcccagcgacatcgccgtggagtgggagagcaatgggcagccggagaacaactacaagaccacgcctcccgtgctggactccgacggctccttcttcctctatagcaagctcaccgtggacaagagcaggtggcagcaggggaacgtcttctcatgctccgtgatgcatgaggctctgcacaaccactacacgcagaagagcctctccctgtctccgggcaaatag

SEQ ID NO: 357 - protein, 453 aa, Artificial Sequence; identical to SEQ ID NO: 303
  Synthetic

SEQ ID NO: 358 - DNA, 1428 bp, Artificial Sequence; identical to SEQ ID NO: 304
  Synthetic

SEQ ID NO: 359 - protein, 453 aa, Artificial Sequence; identical to SEQ ID NO: 303
  Synthetic

SEQ ID NO: 360 - DNA, 1428 bp, Artificial Sequence; identical to SEQ ID NO: 304
  Synthetic

SEQ ID NO: 361 - protein, 447 aa, Artificial Sequence
  Synthetic
EVQLVESGGGLVQPGGSLRLSCAASGFTFSSYWMSWVRQAPGKGLEWVANIKQDGSEEYYVDSVKGRFTISRDNAKNSLYLQMNSLRAEDTAVYYCARDYGDVFDYWGQGTLVTVSSASTKGPSVFPLAPSSKSTSGGTAALGCLVKDYFPEPVTVSWNSGALTSGVHTFPAVLQSSGLYSLSSVVTVPSSSLGTQTYICNVNHKPSNTKVDKKVEPKSCDKTHTCPPCPAPELLGGPSVFLFPPKPKDTLMISRTPEVTCVVVDVSHEDPEVKFNWYVDGVEVHNAKTKPCEEQYGSTYRCVSVLTVLHQDWLNGKEYKCKVSNKALPAPIEKTISKAKGQPREPQVYTLPPSREEMTKNQVSLTCLVKGFYPSDIAVEWESNGQPENNYKTTPPVLDSDGSFFLYSKLTVDKSRWQQGNVFSCSVMHEALHNHYTQKSLSLSPGK

SEQ ID NO: 362 - DNA, 1410 bp, Artificial Sequence
  Synthetic
atggacatgagggtgcccgctcagctcctggggctcctgctgctgtggctgagaggtgcgcgctgtgaggtgcagctggtggagtctgggggaggcttggtccagccgggggggtccctgagactctcctgtgcagcctctggattcacctttagtagctattggatgagctgggtccgccaggctccagggaaggggctggagtgggtggccaacatcaagcaagatggaagtgaggaatattatgtggactctgtgaagggccgattcaccatctccagagacaacgccaagaactcactgtatctgcaaatgaacagcctgagagccgaggacacggctgtgtattactgtgcgagagactacggtgacgtttttgactactggggccagggaaccctggtcaccgtgtcctcagcctccaccaagggcccatcggtcttccccctggcaccctcctccaagagcacctctgggggcacagcggccctgggctgcctggtcaaggactacttccccgaaccggtgacggtgtcgtggaactcaggcgccctgaccagcggcgtgcacaccttcccggctgtcctacagtcctcaggactctactccctcagcagcgtggtgaccgtgccctccagcagcttgggcacccagacctacatctgcaacgtgaatcacaagcccagcaacaccaaggtggacaagaaagttgagcccaaatcttgtgacaaaactcacacatgcccaccgtgcccagcacctgaactcctggggggaccgtcagtcttcctcttccccccaaaacccaaggacaccctcatgatctcccggacccctgaggtcacatgcgtggtggtggacgtgagccacgaagaccctgaggtcaagttcaactggtacgtggacggcgtggaggtgcataatgccaagacaaagccgtgcgaggagcagtacggcagcacgtaccgttgcgtcagcgtcctcaccgtcctgcaccaggactggctgaatggcaaggagtacaagtgcaaggtgtccaacaaagccctcccagcccccatcgagaaaaccatctccaaagccaaagggcagccccgagaaccacaggtgtacaccctgcccccatcccgggaggagatgaccaagaaccaggtcagcctgacctgcctggtcaaaggcttctatcccagcgacatcgccgtggagtgggagagcaatgggcagccggagaacaactacaagaccacgcctcccgtgctggactccgacggctccttcttcctctatagcaagctcaccgtggacaagagcaggtggcagcaggggaacgtcttctcatgctccgtgatgcatgaggctctgcacaaccactacacgcagaagagcctctccctgtctccgggcaaatag

SEQ ID NO: 363 - protein, 447 aa, Artificial Sequence
  Synthetic
EVQLVESGGGLVQPGGSLRLSCAASGFTFSSYWMSWVRQAPGKGLEWVANIKQDGSEEYYVDSVKGRFTISRDNAKNSLYLQMNSLRAEDTAVYYCARDYGDAFDYWGQGTLVTVSSASTKGPSVFPLAPSSKSTSGGTAALGCLVKDYFPEPVTVSWNSGALTSGVHTFPAVLQSSGLYSLSSVVTVPSSSLGTQTYICNVNHKPSNTKVDKKVEPKSCDKTHTCPPCPAPELLGGPSVFLFPPKPKDTLMISRTPEVTCVVVDVSHEDPEVKFNWYVDGVEVHNAKTKPCEEQYGSTYRCVSVLTVLHQDWLNGKEYKCKVSNKALPAPIEKTISKAKGQPREPQVYTLPPSREEMTKNQVSLTCLVKGFYPSDIAVEWESNGQPENNYKTTPPVLDSDGSFFLYSKLTVDKSRWQQGNVFSCSVMHEALHNHYTQKSLSLSPGK

SEQ ID NO: 364 - DNA, 1410 bp, Artificial Sequence
  Synthetic
atggacatgagggtgcccgctcagctcctggggctcctgctgctgtggctgagaggtgcgcgctgtgaggtgcagctggtggagtctgggggaggcttggtccagccgggggggtccctgagactctcctgtgcagcctctggattcacctttagtagctattggatgagctgggtccgccaggctccagggaaggggctggagtgggtggccaacatcaagcaagatggaagtgaggaatattatgtggactctgtgaagggccgattcaccatctccagagacaacgccaagaactcactgtatctgcaaatgaacagcctgagagccgaggacacggctgtgtattactgtgcgagagactacggtgacgcttttgactactggggccagggaaccctggtcaccgtgtcctcagcctccaccaagggcccatcggtcttccccctggcaccctcctccaagagcacctctgggggcacagcggccctgggctgcctggtcaaggactacttccccgaaccggtgacggtgtcgtggaactcaggcgccctgaccagcggcgtgcacaccttcccggctgtcctacagtcctcaggactctactccctcagcagcgtggtgaccgtgccctccagcagcttgggcacccagacctacatctgcaacgtgaatcacaagcccagcaacaccaaggtggacaagaaagttgagcccaaatcttgtgacaaaactcacacatgcccaccgtgcccagcacctgaactcctggggggaccgtcagtcttcctcttccccccaaaacccaaggacaccctcatgatctcccggacccctgaggtcacatgcgtggtggtggacgtgagccacgaagaccctgaggtcaagttcaactggtacgtggacggcgtggaggtgcataatgccaagacaaagccgtgcgaggagcagtacggcagcacgtaccgttgcgtcagcgtcctcaccgtcctgcaccaggactggctgaatggcaaggagtacaagtgcaaggtgtccaacaaagccctcccagcccccatcgagaaaaccatctccaaagccaaagggcagccccgagaaccacaggtgtacaccctgcccccatcccgggaggagatgaccaagaaccaggtcagcctgacctgcctggtcaaaggcttctatcccagcgacatcgccgtggagtgggagagcaatgggcagccggagaacaactacaagaccacgcctcccgtgctggactccgacggctccttcttcctctatagcaagctcaccgtggacaagagcaggtggcagcaggggaacgtcttctcatgctccgtgatgcatgaggctctgcacaaccactacacgcagaagagcctctccctgtctccgggcaaatag

SEQ ID NO: 365 - protein, 447 aa, Artificial Sequence
  Synthetic
EVQLVESGGGLVQPGGSLRLSCAASGFTFSSYWMSWVRQAPGKGLEWVANIKQDGSEEYYVDSVKGRFTISRDNAKNSLYLQMNSLRAEDTAVYYCARDYGESFDYWGQGTLVTVSSASTKGPSVFPLAPSSKSTSGGTAALGCLVKDYFPEPVTVSWNSGALTSGVHTFPAVLQSSGLYSLSSVVTVPSSSLGTQTYICNVNHKPSNTKVDKKVEPKSCDKTHTCPPCPAPELLGGPSVFLFPPKPKDTLMISRTPEVTCVVVDVSHEDPEVKFNWYVDGVEVHNAKTKPCEEQYGSTYRCVSVLTVLHQDWLNGKEYKCKVSNKALPAPIEKTISKAKGQPREPQVYTLPPSREEMTKNQVSLTCLVKGFYPSDIAVEWESNGQPENNYKTTPPVLDSDGSFFLYSKLTVDKSRWQQGNVFSCSVMHEALHNHYTQKSLSLSPGK

SEQ ID NO: 366 - DNA, 1410 bp, Artificial Sequence
  Synthetic
atggacatgagggtgcccgctcagctcctggggctcctgctgctgtggctgagaggtgcgcgctgtgaggtgcagctggtggagtctgggggaggcttggtccagccgggggggtccctgagactctcctgtgcagcctctggattcacctttagtagctattggatgagctgggtccgccaggctccagggaaggggctggagtgggtggccaacatcaagcaagatggaagtgaggaatattatgtggactctgtgaagggccgattcaccatctccagagacaacgccaagaactcactgtatctgcaaatgaacagcctgagagccgaggacacggctgtgtattactgtgcgagagactacggtgaatcctttgactactggggccagggaaccctggtcaccgtgtcctcagcctccaccaagggcccatcggtcttccccctggcaccctcctccaagagcacctctgggggcacagcggccctgggctgcctggtcaaggactacttccccgaaccggtgacggtgtcgtggaactcaggcgccctgaccagcggcgtgcacaccttcccggctgtcctacagtcctcaggactctactccctcagcagcgtggtgaccgtgccctccagcagcttgggcacccagacctacatctgcaacgtgaatcacaagcccagcaacaccaaggtggacaagaaagttgagcccaaatcttgtgacaaaactcacacatgcccaccgtgcccagcacctgaactcctggggggaccgtcagtcttcctcttccccccaaaacccaaggacaccctcatgatctcccggacccctgaggtcacatgcgtggtggtggacgtgagccacgaagaccctgaggtcaagttcaactggtacgtggacggcgtggaggtgcataatgccaagacaaagccgtgcgaggagcagtacggcagcacgtaccgttgcgtcagcgtcctcaccgtcctgcaccaggactggctgaatggcaaggagtacaagtgcaaggtgtccaacaaagccctcccagcccccatcgagaaaaccatctccaaagccaaagggcagccccgagaaccacaggtgtacaccctgcccccatcccgggaggagatgaccaagaaccaggtcagcctgacctgcctggtcaaaggcttctatcccagcgacatcgccgtggagtgggagagcaatgggcagccggagaacaactacaagaccacgcctcccgtgctggactccgacggctccttcttcctctatagcaagctcaccgtggacaagagcaggtggcagcaggggaacgtcttctcatgctccgtgatgcatgaggctctgcacaaccactacacgcagaagagcctctccctgtctccgggcaaatag

SEQ ID NO: 367 - protein, 452 aa, Artificial Sequence
  Synthetic
QVQLVQSGAEVKKPGASVKVSCKASGYTFTRYDINWVRQAPGQGLEWMGWMNPNSGNSGSVQKFRGRVTMTRDTSIHIAYMELSSLRSEDTAVYYCARGGYTSSWRWYFDLWGRGTLVTVSSASTKGPSVFPLAPSSKSTSGGTAALGCLVKDYFPEPVTVSWNSGALTSGVHTFPAVLQSSGLYSLSSVVTVPSSSLGTQTYICNVNHKPSNTKVDKKVEPKSCDKTHTCPPCPAPELLGGPSVFLFPPKPKDTLMISRTPEVTCVVVDVSHEDPEVKFNWYVDGVEVHNAKTKPCEEQYGSTYRCVSVLTVLHQDWLNGKEYKCKVSNKALPAPIEKTISKAKGQPREPQVYTLPPSREEMTKNQVSLTCLVKGFYPSDIAVEWESNGQPENNYKTTPPVLDSDGSFFLYSKLTVDKSRWQQGNVFSCSVMHEALHNHYTQKSLSLSPGK

SEQ ID NO: 368 - DNA, 1425 bp, Artificial Sequence
  Synthetic
atggacatgagggtgcccgctcagctcctggggctcctgctgctgtggctgagaggtgcgcgctgtcaggtgcagctggtgcagtctggggctgaggtgaagaagcctggggcctcagtgaaggtgtcctgcaaggcttctggatacaccttcaccagatatgatatcaactgggtgcgacaggcccctggacaaggacttgagtggatgggatggatgaaccctaacagtggtaactcaggctctgtacagaagttccggggcagagtcaccatgaccagggacacctccatccacatcgcctacatggaactgagcagcctgagatctgaggacacggccgtgtattactgtgcgagaggcgggtataccagcagctggcggtggtacttcgatctctggggccgtggcaccctggtcactgtctcctcagcctccaccaagggcccatcggtcttccccctggcaccctcctccaagagcacctctgggggcacagcggccctgggctgcctggtcaaggactacttccccgaaccggtgacggtgtcgtggaactcaggcgccctgaccagcggcgtgcacaccttcccggctgtcctacagtcctcaggactctactccctcagcagcgtggtgaccgtgccctccagcagcttgggcacccagacctacatctgcaacgtgaatcacaagcccagcaacaccaaggtggacaagaaagttgagcccaaatcttgtgacaaaactcacacatgcccaccgtgcccagcacctgaactcctggggggaccgtcagtcttcctcttccccccaaaacccaaggacaccctcatgatctcccggacccctgaggtcacatgcgtggtggtggacgtgagccacgaagaccctgaggtcaagttcaactggtacgtggacggcgtggaggtgcataatgccaagacaaagccgtgcgaggagcagtacggcagcacgtaccgttgcgtcagcgtcctcaccgtcctgcaccaggactggctgaatggcaaggagtacaagtgcaaggtgtccaacaaagccctcccagcccccatcgagaaaaccatctccaaagccaaagggcagccccgagaaccacaggtgtacaccctgcccccatcccgggaggagatgaccaagaaccaggtcagcctgacctgcctggtcaaaggcttctatcccagcgacatcgccgtggagtgggagagcaatgggcagccggagaacaactacaagaccacgcctcccgtgctggactccgacggctccttcttcctctatagcaagctcaccgtggacaagagcaggtggcagcaggggaacgtcttctcatgctccgtgatgcatgaggctctgcacaaccactacacgcagaagagcctctccctgtctccgggcaaatag

SEQ ID NO: 369 - protein, 452 aa, Artificial Sequence
  Synthetic
QVQLVQSGAEVKKPGASVKVSCKASGYTFTRYDINWVRQATGQGLEWMGWMNPNSGNAGSVQKFRGRVTMTRDTSIHIAYMELSSLRSEDTAVYYCARGGYTSSWRWYFDLWGRGTLVTVSSASTKGPSVFPLAPSSKSTSGGTAALGCLVKDYFPEPVTVSWNSGALTSGVHTFPAVLQSSGLYSLSSVVTVPSSSLGTQTYICNVNHKPSNTKVDKKVEPKSCDKTHTCPPCPAPELLGGPSVFLFPPKPKDTLMISRTPEVTCVVVDVSHEDPEVKFNWYVDGVEVHNAKTKPCEEQYGSTYRCVSVLTVLHQDWLNGKEYKCKVSNKALPAPIEKTISKAKGQPREPQVYTLPPSREEMTKNQVSLTCLVKGFYPSDIAVEWESNGQPENNYKTTPPVLDSDGSFFLYSKLTVDKSRWQQGNVFSCSVMHEALHNHYTQKSLSLSPGK

SEQ ID NO: 370 - DNA, 1425 bp, Artificial Sequence
  Synthetic
atggacatgagggtgcccgctcagctcctggggctcctgctgctgtggctgagaggtgcgcgctgtcaggtgcagctggtgcagtctggggctgaggtgaagaagcctggggcctcagtgaaggtgtcctgcaaggcttctggatacaccttcaccagatatgatatcaactgggtgcgacaggccactggacaaggacttgagtggatgggatggatgaaccctaacagtggtaacgctggctctgtacagaagttccggggcagagtcaccatgaccagggacacctccatccacatcgcctacatggaactgagcagcctgagatctgaggacacggccgtgtattactgtgcgagaggcgggtataccagcagctggcggtggtacttcgatctctggggccgtggcaccctggtcactgtctcctcagcctccaccaagggcccatcggtcttccccctggcaccctcctccaagagcacctctgggggcacagcggccctgggctgcctggtcaaggactacttccccgaaccggtgacggtgtcgtggaactcaggcgccctgaccagcggcgtgcacaccttcccggctgtcctacagtcctcaggactctactccctcagcagcgtggtgaccgtgccctccagcagcttgggcacccagacctacatctgcaacgtgaatcacaagcccagcaacaccaaggtggacaagaaagttgagcccaaatcttgtgacaaaactcacacatgcccaccgtgcccagcacctgaactcctggggggaccgtcagtcttcctcttccccccaaaacccaaggacaccctcatgatctcccggacccctgaggtcacatgcgtggtggtggacgtgagccacgaagaccctgaggtcaagttcaactggtacgtggacggcgtggaggtgcataatgccaagacaaagccgtgcgaggagcagtacggcagcacgtaccgttgcgtcagcgtcctcaccgtcctgcaccaggactggctgaatggcaaggagtacaagtgcaaggtgtccaacaaagccctcccagcccccatcgagaaaaccatctccaaagccaaagggcagccccgagaaccacaggtgtacaccctgcccccatcccgggaggagatgaccaagaaccaggtcagcctgacctgcctggtcaaaggcttctatcccagcgacatcgccgtggagtgggagagcaatgggcagccggagaacaactacaagaccacgcctcccgtgctggactccgacggctccttcttcctctatagcaagctcaccgtggacaagagcaggtggcagcaggggaacgtcttctcatgctccgtgatgcatgaggctctgcacaaccactacacgcagaagagcctctccctgtctccgggcaaatag

SEQ ID NO: 371 - protein, 452 aa, Artificial Sequence
  Synthetic
QVQLVQSGAEVKKPGASVKVSCKASGYTFTRYDINWVRQATGQGLEWMGWMNPNAGNAGSVQKFRGRVTMTRDTSIHIAYMELSSLRSEDTAVYYCARGGYTSSWRWYFDLWGRGTLVTVSSASTKGPSVFPLAPSSKSTSGGTAALGCLVKDYFPEPVTVSWNSGALTSGVHTFPAVLQSSGLYSLSSVVTVPSSSLGTQTYICNVNHKPSNTKVDKKVEPKSCDKTHTCPPCPAPELLGGPSVFLFPPKPKDTLMISRTPEVTCVVVDVSHEDPEVKFNWYVDGVEVHNAKTKPCEEQYGSTYRCVSVLTVLHQDWLNGKEYKCKVSNKALPAPIEKTISKAKGQPREPQVYTLPPSREEMTKNQVSLTCLVKGFYPSDIAVEWESNGQPENNYKTTPPVLDSDGSFFLYSKLTVDKSRWQQGNVFSCSVMHEALHNHYTQKSLSLSPGK

SEQ ID NO: 372 - DNA, 1425 bp, Artificial Sequence
  Synthetic
atggacatgagggtgcccgctcagctcctggggctcctgctgctgtggctgagaggtgcgcgctgtcaggtgcagctggtgcagtctggggctgaggtgaagaagcctggggcctcagtgaaggtgtcctgcaaggcttctggatacaccttcaccagatatgatatcaactgggtgcgacaggccactggacaaggacttgagtggatgggatggatgaaccctaacgctggtaacgctggctctgtacagaagttccggggcagagtcaccatgaccagggacacctccatccacatcgcctacatggaactgagcagcctgagatctgaggacacggccgtgtattactgtgcgagaggcgggtataccagcagctggcggtggtacttcgatctctggggccgtggcaccctggtcactgtctcctcagcctccaccaagggcccatcggtcttccccctggcaccctcctccaagagcacctctgggggcacagcggccctgggctgcctggtcaaggactacttccccgaaccggtgacggtgtcgtggaactcaggcgccctgaccagcggcgtgcacaccttcccggctgtcctacagtcctcaggactctactccctcagcagcgtggtgaccgtgccctccagcagcttgggcacccagacctacatctgcaacgtgaatcacaagcccagcaacaccaaggtggacaagaaagttgagcccaaatcttgtgacaaaactcacacatgcccaccgtgcccagcacctgaactcctggggggaccgtcagtcttcctcttccccccaaaacccaaggacaccctcatgatctcccggacccctgaggtcacatgcgtggtggtggacgtgagccacgaagaccctgaggtcaagttcaactggtacgtggacggcgtggaggtgcataatgccaagacaaagccgtgcgaggagcagtacggcagcacgtaccgttgcgtcagcgtcctcaccgtcctgcaccaggactggctgaatggcaaggagtacaagtgcaaggtgtccaacaaagccctcccagcccccatcgagaaaaccatctccaaagccaaagggcagccccgagaaccacaggtgtacaccctgcccccatcccgggaggagatgaccaagaaccaggtcagcctgacctgcctggtcaaaggcttctatcccagcgacatcgccgtggagtgggagagcaatgggcagccggagaacaactacaagaccacgcctcccgtgctggactccgacggctccttcttcctctatagcaagctcaccgtggacaagagcaggtggcagcaggggaacgtcttctcatgctccgtgatgcatgaggctctgcacaaccactacacgcagaagagcctctccctgtctccgggcaaatag

SEQ ID NO: 373 - protein, 452 aa, Artificial Sequence
  Synthetic
QVQLVQSGAEVKKPGASVKVSCKASGYTFTRYDINWVRQATGQGLEWMGWMNPNAGNSGSVQKFRGRVTMTRDTSIHIAYMELSSLRSEDTAVYYCARGGYTSSWRWYFDLWGRGTLVTVSSASTKGPSVFPLAPSSKSTSGGTAALGCLVKDYFPEPVTVSWNSGALTSGVHTFPAVLQSSGLYSLSSVVTVPSSSLGTQTYICNVNHKPSNTKVDKKVEPKSCDKTHTCPPCPAPELLGGPSVFLFPPKPKDTLMISRTPEVTCVVVDVSHEDPEVKFNWYVDGVEVHNAKTKPCEEQYGSTYRCVSVLTVLHQDWLNGKEYKCKVSNKALPAPIEKTISKAKGQPREPQVYTLPPSREEMTKNQVSLTCLVKGFYPSDIAVEWESNGQPENNYKTTPPVLDSDGSFFLYSKLTVDKSRWQQGNVFSCSVMHEALHNHYTQKSLSLSPGK

SEQ ID NO: 374 - DNA, 1425 bp, Artificial Sequence
  Synthetic
atggacatgagggtgcccgctcagctcctggggctcctgctgctgtggctgagaggtgcgcgctgtcaggtgcagctggtgcagtctggggctgaggtgaagaagcctggggcctcagtgaaggtgtcctgcaaggcttctggatacaccttcaccagatatgatatcaactgggtgcgacaggccactggacaaggacttgagtggatgggatggatgaaccctaacgctggtaactcaggctctgtacagaagttccggggcagagtcaccatgaccagggacacctccatccacatcgcctacatggaactgagcagcctgagatctgaggacacggccgtgtattactgtgcgagaggcgggtataccagcagctggcggtggtacttcgatctctggggccgtggcaccctggtcactgtctcctcagcctccaccaagggcccatcggtcttccccctggcaccctcctccaagagcacctctgggggcacagcggccctgggctgcctggtcaaggactacttccccgaaccggtgacggtgtcgtggaactcaggcgccctgaccagcggcgtgcacaccttcccggctgtcctacagtcctcaggactctactccctcagcagcgtggtgaccgtgccctccagcagcttgggcacccagacctacatctgcaacgtgaatcacaagcccagcaacaccaaggtggacaagaaagttgagcccaaatcttgtgacaaaactcacacatgcccaccgtgcccagcacctgaactcctggggggaccgtcagtcttcctcttccccccaaaacccaaggacaccctcatgatctcccggacccctgaggtcacatgcgtggtggtggacgtgagccacgaagaccctgaggtcaagttcaactggtacgtggacggcgtggaggtgcataatgccaagacaaagccgtgcgaggagcagtacggcagcacgtaccgttgcgtcagcgtcctcaccgtcctgcaccaggactggctgaatggcaaggagtacaagtgcaaggtgtccaacaaagccctcccagcccccatcgagaaaaccatctccaaagccaaagggcagccccgagaaccacaggtgtacaccctgcccccatcccgggaggagatgaccaagaaccaggtcagcctgacctgcctggtcaaaggcttctatcccagcgacatcgccgtggagtgggagagcaatgggcagccggagaacaactacaagaccacgcctcccgtgctggactccgacggctccttcttcctctatagcaagctcaccgtggacaagagcaggtggcagcaggggaacgtcttctcatgctccgtgatgcatgaggctctgcacaaccactacacgcagaagagcctctccctgtctccgggcaaatag

SEQ ID NO: 375 - protein, 452 aa, Artificial Sequence
  Synthetic
QVQLVQSGAEVKKPGASVKVSCKASGYTFTRYDINWVRQATGQGLEWMGWMNPNSGNSGSVQKFRGRVTMTRDTSIHIAYMELSSLRSEDTAVYYCARGGYTSSWRYYFDLWGRGTLVTVSSASTKGPSVFPLAPSSKSTSGGTAALGCLVKDYFPEPVTVSWNSGALTSGVHTFPAVLQSSGLYSLSSVVTVPSSSLGTQTYICNVNHKPSNTKVDKKVEPKSCDKTHTCPPCPAPELLGGPSVFLFPPKPKDTLMISRTPEVTCVVVDVSHEDPEVKFNWYVDGVEVHNAKTKPCEEQYGSTYRCVSVLTVLHQDWLNGKEYKCKVSNKALPAPIEKTISKAKGQPREPQVYTLPPSREEMTKNQVSLTCLVKGFYPSDIAVEWESNGQPENNYKTTPPVLDSDGSFFLYSKLTVDKSRWQQGNVFSCSVMHEALHNHYTQKSLSLSPGK

SEQ ID NO: 376 - DNA, 1425 bp, Artificial Sequence
  Synthetic
atggacatgagggtgcccgctcagctcctggggctcctgctgctgtggctgagaggtgcgcgctgtcaggtgcagctggtgcagtctggggctgaggtgaagaagcctggggcctcagtgaaggtgtcctgcaaggcttctggatacaccttcaccagatatgatatcaactgggtgcgacaggccactggacaaggacttgagtggatgggatggatgaaccctaacagtggtaactcaggctctgtacagaagttccggggcagagtcaccatgaccagggacacctccatccacatcgcctacatggaactgagcagcctgagatctgaggacacggccgtgtattactgtgcgagaggcgggtataccagcagctggcggtattacttcgatctctggggccgtggcaccctggtcactgtctcctcagcctccaccaagggcccatcggtcttccccctggcaccctcctccaagagcacctctgggggcacagcggccctgggctgcctggtcaaggactacttccccgaaccggtgacggtgtcgtggaactcaggcgccctgaccagcggcgtgcacaccttcccggctgtcctacagtcctcaggactctactccctcagcagcgtggtgaccgtgccctccagcagcttgggcacccagacctacatctgcaacgtgaatcacaagcccagcaacaccaaggtggacaagaaagttgagcccaaatcttgtgacaaaactcacacatgcccaccgtgcccagcacctgaactcctggggggaccgtcagtcttcctcttccccccaaaacccaaggacaccctcatgatctcccggacccctgaggtcacatgcgtggtggtggacgtgagccacgaagaccctgaggtcaagttcaactggtacgtggacggcgtggaggtgcataatgccaagacaaagccgtgcgaggagcagtacggcagcacgtaccgttgcgtcagcgtcctcaccgtcctgcaccaggactggctgaatggcaaggagtacaagtgcaaggtgtccaacaaagccctcccagcccccatcgagaaaaccatctccaaagccaaagggcagccccgagaaccacaggtgtacaccctgcccccatcccgggaggagatgaccaagaaccaggtcagcctgacctgcctggtcaaaggcttctatcccagcgacatcgccgtggagtgggagagcaatgggcagccggagaacaactacaagaccacgcctcccgtgctggactccgacggctccttcttcctctatagcaagctcaccgtggacaagagcaggtggcagcaggggaacgtcttctcatgctccgtgatgcatgaggctctgcacaaccactacacgcagaagagcctctccctgtctccgggcaaatag

SEQ ID NO: 377 - protein, 452 aa, Artificial Sequence
  Synthetic
QVQLVQSGAEVKKPGASVKVSCKASGYTFTRYDINWVRQATGQGLEWMGWMNPNSGNSGSVQKFRGRVTMTRDTSIHIAYMELSSLRSEDTAVYYCARGGYTSSWRHYFDLWGRGTLVTVSSASTKGPSVFPLAPSSKSTSGGTAALGCLVKDYFPEPVTVSWNSGALTSGVHTFPAVLQSSGLYSLSSVVTVPSSSLGTQTYICNVNHKPSNTKVDKKVEPKSCDKTHTCPPCPAPELLGGPSVFLFPPKPKDTLMISRTPEVTCVVVDVSHEDPEVKFNWYVDGVEVHNAKTKPCEEQYGSTYRCVSVLTVLHQDWLNGKEYKCKVSNKALPAPIEKTISKAKGQPREPQVYTLPPSREEMTKNQVSLTCLVKGFYPSDIAVEWESNGQPENNYKTTPPVLDSDGSFFLYSKLTVDKSRWQQGNVFSCSVMHEALHNHYTQKSLSLSPGK

SEQ ID NO: 378 - DNA, 1425 bp, Artificial Sequence
  Synthetic
atggacatgagggtgcccgctcagctcctggggctcctgctgctgtggctgagaggtgcgcgctgtcaggtgcagctggtgcagtctggggctgaggtgaagaagcctggggcctcagtgaaggtgtcctgcaaggcttctggatacaccttcaccagatatgatatcaactgggtgcgacaggccactggacaaggacttgagtggatgggatggatgaaccctaacagtggtaactcaggctctgtacagaagttccggggcagagtcaccatgaccagggacacctccatccacatcgcctacatggaactgagcagcctgagatctgaggacacggccgtgtattactgtgcgagaggcgggtataccagcagctggcggcattacttcgatctctggggccgtggcaccctggtcactgtctcctcagcctccaccaagggcccatcggtcttccccctggcaccctcctccaagagcacctctgggggcacagcggccctgggctgcctggtcaaggactacttccccgaaccggtgacggtgtcgtggaactcaggcgccctgaccagcggcgtgcacaccttcccggctgtcctacagtcctcaggactctactccctcagcagcgtggtgaccgtgccctccagcagcttgggcacccagacctacatctgcaacgtgaatcacaagcccagcaacaccaaggtggacaagaaagttgagcccaaatcttgtgacaaaactcacacatgcccaccgtgcccagcacctgaactcctggggggaccgtcagtcttcctcttccccccaaaacccaaggacaccctcatgatctcccggacccctgaggtcacatgcgtggtggtggacgtgagccacgaagaccctgaggtcaagttcaactggtacgtggacggcgtggaggtgcataatgccaagacaaagccgtgcgaggagcagtacggcagcacgtaccgttgcgtcagcgtcctcaccgtcctgcaccaggactggctgaatggcaaggagtacaagtgcaaggtgtccaacaaagccctcccagcccccatcgagaaaaccatctccaaagccaaagggcagccccgagaaccacaggtgtacaccctgcccccatcccgggaggagatgaccaagaaccaggtcagcctgacctgcctggtcaaaggcttctatcccagcgacatcgccgtggagtgggagagcaatgggcagccggagaacaactacaagaccacgcctcccgtgctggactccgacggctccttcttcctctatagcaagctcaccgtggacaagagcaggtggcagcaggggaacgtcttctcatgctccgtgatgcatgaggctctgcacaaccactacacgcagaagagcctctccctgtctccgggcaaatag

SEQ ID NO: 379 - protein, 452 aa, Artificial Sequence
  Synthetic
QVQLVQSGAEVKKPGASVKVSCKASGYTFTRYDINWVRQATGQGLEWMGWMNPNSGNSGSVQKFRGRVTMTRDTSIHIAYMELSSLRSEDTAVYYCARGGYTSSWRFYFDLWGRGTLVTVSSASTKGPSVFPLAPSSKSTSGGTAALGCLVKDYFPEPVTVSWNSGALTSGVHTFPAVLQSSGLYSLSSVVTVPSSSLGTQTYICNVNHKPSNTKVDKKVEPKSCDKTHTCPPCPAPELLGGPSVFLFPPKPKDTLMISRTPEVTCVVVDVSHEDPEVKFNWYVDGVEVHNAKTKPCEEQYGSTYRCVSVLTVLHQDWLNGKEYKCKVSNKALPAPIEKTISKAKGQPREPQVYTLPPSREEMTKNQVSLTCLVKGFYPSDIAVEWESNGQPENNYKTTPPVLDSDGSFFLYSKLTVDKSRWQQGNVFSCSVMHEALHNHYTQKSLSLSPGK

SEQ ID NO: 380 - DNA, 1425 bp, Artificial Sequence
  Synthetic
atggacatgagggtgcccgctcagctcctggggctcctgctgctgtggctgagaggtgcgcgctgtcaggtgcagctggtgcagtctggggctgaggtgaagaagcctggggcctcagtgaaggtgtcctgcaaggcttctggatacaccttcaccagatatgatatcaactgggtgcgacaggccactggacaaggacttgagtggatgggatggatgaaccctaacagtggtaactcaggctctgtacagaagttccggggcagagtcaccatgaccagggacacctccatccacatcgcctacatggaactgagcagcctgagatctgaggacacggccgtgtattactgtgcgagaggcgggtataccagcagctggcggttttacttcgatctctggggccgtggcaccctggtcactgtctcctcagcctccaccaagggcccatcggtcttccccctggcaccctcctccaagagcacctctgggggcacagcggccctgggctgcctggtcaaggactacttccccgaaccggtgacggtgtcgtggaactcaggcgccctgaccagcggcgtgcacaccttcccggctgtcctacagtcctcaggactctactccctcagcagcgtggtgaccgtgccctccagcagcttgggcacccagacctacatctgcaacgtgaatcacaagcccagcaacaccaaggtggacaagaaagttgagcccaaatcttgtgacaaaactcacacatgcccaccgtgcccagcacctgaactcctggggggaccgtcagtcttcctcttccccccaaaacccaaggacaccctcatgatctcccggacccctgaggtcacatgcgtggtggtggacgtgagccacgaagaccctgaggtcaagttcaactggtacgtggacggcgtggaggtgcataatgccaagacaaagccgtgcgaggagcagtacggcagcacgtaccgttgcgtcagcgtcctcaccgtcctgcaccaggactggctgaatggcaaggagtacaagtgcaaggtgtccaacaaagccctcccagcccccatcgagaaaaccatctccaaagccaaagggcagccccgagaaccacaggtgtacaccctgcccccatcccgggaggagatgaccaagaaccaggtcagcctgacctgcctggtcaaaggcttctatcccagcgacatcgccgtggagtgggagagcaatgggcagccggagaacaactacaagaccacgcctcccgtgctggactccgacggctccttcttcctctatagcaagctcaccgtggacaagagcaggtggcagcaggggaacgtcttctcatgctccgtgatgcatgaggctctgcacaaccactacacgcagaagagcctctccctgtctccgggcaaatag

SEQ ID NO: 381 - protein, 452 aa, Artificial Sequence; identical to SEQ ID NO: 285
  Synthetic

SEQ ID NO: 382 - DNA, 1425 bp, Artificial Sequence; identical to SEQ ID NO: 286
  Synthetic

SEQ ID NO: 383 - protein, 452 aa, Artificial Sequence
  Synthetic
QVQLVQSGAEVKKPGASVKVSCKASGYTFTRYDINWVRQATGQGLEWMGWMNPNSGQSGSVQKFRGRVTMTRDTSIHIAYMELSSLRSEDTAVYYCARGGYTSSWRWYFDLWGRGTLVTVSSASTKGPSVFPLAPSSKSTSGGTAALGCLVKDYFPEPVTVSWNSGALTSGVHTFPAVLQSSGLYSLSSVVTVPSSSLGTQTYICNVNHKPSNTKVDKKVEPKSCDKTHTCPPCPAPELLGGPSVFLFPPKPKDTLMISRTPEVTCVVVDVSHEDPEVKFNWYVDGVEVHNAKTKPCEEQYGSTYRCVSVLTVLHQDWLNGKEYKCKVSNKALPAPIEKTISKAKGQPREPQVYTLPPSREEMTKNQVSLTCLVKGFYPSDIAVEWESNGQPENNYKTTPPVLDSDGSFFLYSKLTVDKSRWQQGNVFSCSVMHEALHNHYTQKSLSLSPGK

SEQ ID NO: 384 - DNA, 1425 bp, Artificial Sequence
  Synthetic
atggacatgagggtgcccgctcagctcctggggctcctgctgctgtggctgagaggtgcgcgctgtcaggtgcagctggtgcagtctggggctgaggtgaagaagcctggggcctcagtgaaggtgtcctgcaaggcttctggatacaccttcaccagatatgatatcaactgggtgcgacaggccactggacaaggacttgagtggatgggatggatgaaccctaacagtggtcaatcaggctctgtacagaagttccggggcagagtcaccatgaccagggacacctccatccacatcgcctacatggaactgagcagcctgagatctgaggacacggccgtgtattactgtgcgagaggcgggtataccagcagctggcggtggtacttcgatctctggggccgtggcaccctggtcactgtctcctcagcctccaccaagggcccatcggtcttccccctggcaccctcctccaagagcacctctgggggcacagcggccctgggctgcctggtcaaggactacttccccgaaccggtgacggtgtcgtggaactcaggcgccctgaccagcggcgtgcacaccttcccggctgtcctacagtcctcaggactctactccctcagcagcgtggtgaccgtgccctccagcagcttgggcacccagacctacatctgcaacgtgaatcacaagcccagcaacaccaaggtggacaagaaagttgagcccaaatcttgtgacaaaactcacacatgcccaccgtgcccagcacctgaactcctggggggaccgtcagtcttcctcttccccccaaaacccaaggacaccctcatgatctcccggacccctgaggtcacatgcgtggtggtggacgtgagccacgaagaccctgaggtcaagttcaactggtacgtggacggcgtggaggtgcataatgccaagacaaagccgtgcgaggagcagtacggcagcacgtaccgttgcgtcagcgtcctcaccgtcctgcaccaggactggctgaatggcaaggagtacaagtgcaaggtgtccaacaaagccctcccagcccccatcgagaaaaccatctccaaagccaaagggcagccccgagaaccacaggtgtacaccctgcccccatcccgggaggagatgaccaagaaccaggtcagcctgacctgcctggtcaaaggcttctatcccagcgacatcgccgtggagtgggagagcaatgggcagccggagaacaactacaagaccacgcctcccgtgctggactccgacggctccttcttcctctatagcaagctcaccgtggacaagagcaggtggcagcaggggaacgtcttctcatgctccgtgatgcatgaggctctgcacaaccactacacgcagaagagcctctccctgtctccgggcaaatag

SEQ ID NO: 385 - protein, 452 aa, Artificial Sequence
  Synthetic
QVQLVQSGAEVKKPGASVKVSCKASGYTFTRYDINWVRQATGQGLEWMGWMNPQSGNSGSVQKFRGRVTMTRDTSIHIAYMELSSLRSEDTAVYYCARGGYTSSWRWYFDLWGRGTLVTVSSASTKGPSVFPLAPSSKSTSGGTAALGCLVKDYFPEPVTVSWNSGALTSGVHTFPAVLQSSGLYSLSSVVTVPSSSLGTQTYICNVNHKPSNTKVDKKVEPKSCDKTHTCPPCPAPELLGGPSVFLFPPKPKDTLMISRTPEVTCVVVDVSHEDPEVKFNWYVDGVEVHNAKTKPCEEQYGSTYRCVSVLTVLHQDWLNGKEYKCKVSNKALPAPIEKTISKAKGQPREPQVYTLPPSREEMTKNQVSLTCLVKGFYPSDIAVEWESNGQPENNYKTTPPVLDSDGSFFLYSKLTVDKSRWQQGNVFSCSVMHEALHNHYTQKSLSLSPGK

SEQ ID NO: 386 - DNA, 1425 bp, Artificial Sequence
  Synthetic
atggacatgagggtgcccgctcagctcctggggctcctgctgctgtggctgagaggtgcgcgctgtcaggtgcagctggtgcagtctggggctgaggtgaagaagcctggggcctcagtgaaggtgtcctgcaaggcttctggatacaccttcaccagatatgatatcaactgggtgcgacaggccactggacaaggacttgagtggatgggatggatgaaccctcaaagtggtaactcaggctctgtacagaagttccggggcagagtcaccatgaccagggacacctccatccacatcgcctacatggaactgagcagcctgagatctgaggacacggccgtgtattactgtgcgagaggcgggtataccagcagctggcggtggtacttcgatctctggggccgtggcaccctggtcactgtctcctcagcctccaccaagggcccatcggtcttccccctggcaccctcctccaagagcacctctgggggcacagcggccctgggctgcctggtcaaggactacttccccgaaccggtgacggtgtcgtggaactcaggcgccctgaccagcggcgtgcacaccttcccggctgtcctacagtcctcaggactctactccctcagcagcgtggtgaccgtgccctccagcagcttgggcacccagacctacatctgcaacgtgaatcacaagcccagcaacaccaaggtggacaagaaagttgagcccaaatcttgtgacaaaactcacacatgcccaccgtgcccagcacctgaactcctggggggaccgtcagtcttcctcttccccccaaaacccaaggacaccctcatgatctcccggacccctgaggtcacatgcgtggtggtggacgtgagccacgaagaccctgaggtcaagttcaactggtacgtggacggcgtggaggtgcataatgccaagacaaagccgtgcgaggagcagtacggcagcacgtaccgttgcgtcagcgtcctcaccgtcctgcaccaggactggctgaatggcaaggagtacaagtgcaaggtgtccaacaaagccctcccagcccccatcgagaaaaccatctccaaagccaaagggcagccccgagaaccacaggtgtacaccctgcccccatcccgggaggagatgaccaagaaccaggtcagcctgacctgcctggtcaaaggcttctatcccagcgacatcgccgtggagtgggagagcaatgggcagccggagaacaactacaagaccacgcctcccgtgctggactccgacggctccttcttcctctatagcaagctcaccgtggacaagagcaggtggcagcaggggaacgtcttctcatgctccgtgatgcatgaggctctgcacaaccactacacgcagaagagcctctccctgtctccgggcaaatag

SEQ ID NO: 387 - protein, 452 aa, Artificial Sequence
  Synthetic
QVQLVQSGAEVKKPGASVKVSCKASGYTFTRYDINWVRQATGQGLEWMGWMNPQSGQSGSVQKFRGRVTMTRDTSIHIAYMELSSLRSEDTAVYYCARGGYTSSWRWYFDLWGRGTLVTVSSASTKGPSVFPLAPSSKSTSGGTAALGCLVKDYFPEPVTVSWNSGALTSGVHTFPAVLQSSGLYSLSSVVTVPSSSLGTQTYICNVNHKPSNTKVDKKVEPKSCDKTHTCPPCPAPELLGGPSVFLFPPKPKDTLMISRTPEVTCVVVDVSHEDPEVKFNWYVDGVEVHNAKTKPCEEQYGSTYRCVSVLTVLHQDWLNGKEYKCKVSNKALPAPIEKTISKAKGQPREPQVYTLPPSREEMTKNQVSLTCLVKGFYPSDIAVEWESNGQPENNYKTTPPVLDSDGSFFLYSKLTVDKSRWQQGNVFSCSVMHEALHNHYTQKSLSLSPGK

SEQ ID NO: 388 - DNA, 1425 bp, Artificial Sequence
  Synthetic
atggacatgagggtgcccgctcagctcctggggctcctgctgctgtggctgagaggtgcgcgctgtcaggtgcagctggtgcagtctggggctgaggtgaagaagcctggggcctcagtgaaggtgtcctgcaaggcttctggatacaccttcaccagatatgatatcaactgggtgcgacaggccactggacaaggacttgagtggatgggatggatgaaccctcaaagtggtcaatcaggctctgtacagaagttccggggcagagtcaccatgaccagggacacctccatccacatcgcctacatggaactgagcagcctgagatctgaggacacggccgtgtattactgtgcgagaggcgggtataccagcagctggcggtggtacttcgatctctggggccgtggcaccctggtcactgtctcctcagcctccaccaagggcccatcggtcttccccctggcaccctcctccaagagcacctctgggggcacagcggccctgggctgcctggtcaaggactacttccccgaaccggtgacggtgtcgtggaactcaggcgccctgaccagcggcgtgcacaccttcccggctgtcctacagtcctcaggactctactccctcagcagcgtggtgaccgtgccctccagcagcttgggcacccagacctacatctgcaacgtgaatcacaagcccagcaacaccaaggtggacaagaaagttgagcccaaatcttgtgacaaaactcacacatgcccaccgtgcccagcacctgaactcctggggggaccgtcagtcttcctcttccccccaaaacccaaggacaccctcatgatctcccggacccctgaggtcacatgcgtggtggtggacgtgagccacgaagaccctgaggtcaagttcaactggtacgtggacggcgtggaggtgcataatgccaagacaaagccgtgcgaggagcagtacggcagcacgtaccgttgcgtcagcgtcctcaccgtcctgcaccaggactggctgaatggcaaggagtacaagtgcaaggtgtccaacaaagccctcccagcccccatcgagaaaaccatctccaaagccaaagggcagccccgagaaccacaggtgtacaccctgcccccatcccgggaggagatgaccaagaaccaggtcagcctgacctgcctggtcaaaggcttctatcccagcgacatcgccgtggagtgggagagcaatgggcagccggagaacaactacaagaccacgcctcccgtgctggactccgacggctccttcttcctctatagcaagctcaccgtggacaagagcaggtggcagcaggggaacgtcttctcatgctccgtgatgcatgaggctctgcacaaccactacacgcagaagagcctctccctgtctccgggcaaatag

SEQ ID NO: 389 - protein, 451 aa, Artificial Sequence
  Synthetic
QVQLVQSGAEVKKPGASVKVSCKASGYTFNGYYIHWVRQAPGQGLEWMGWLNPNSGGANYAQKFQGRVTMTRDTSISTAYMELSRLRSDDTAVYYCARDQRKTTVTPFEYWGQGTLVTVSSASTKGPSVFPLAPSSKSTSGGTAALGCLVKDYFPEPVTVSWNSGALTSGVHTFPAVLQSSGLYSLSSVVTVPSSSLGTQTYICNVNHKPSNTKVDKKVEPKSCDKTHTCPPCPAPELLGGPSVFLFPPKPKDTLMISRTPEVTCVVVDVSHEDPEVKFNWYVDGVEVHNAKTKPCEEQYGSTYRCVSVLTVLHQDWLNGKEYKCKVSNKALPAPIEKTISKAKGQPREPQVYTLPPSREEMTKNQVSLTCLVKGFYPSDIAVEWESNGQPENNYKTTPPVLDSDGSFFLYSKLTVDKSRWQQGNVFSCSVMHEALHNHYTQKSLSLSPGK

SEQ ID NO: 390 - DNA, 1422 bp, Artificial Sequence
  Synthetic
atggacatgagggtgcccgctcagctcctggggctcctgctgctgtggctgagaggtgcgcgctgtcaggtgcagctggtgcagtctggggctgaggtgaagaagcctggggcctcagtgaaggtgtcctgcaaggcttctggatacaccttcaacggctactatatccactgggtgcgacaggcccctggacaagggcttgagtggatgggatggctcaacccaaacagtggtggcgcaaactatgcacagaagtttcagggccgtgtcaccatgaccagggacacgtccatcagcacagcctacatggagctgagcaggctgcgttctgacgacacggccgtgtattactgtgcgagagatcagaggaagaccacggtgactccctttgagtactggggccagggaaccctggtcaccgtgtcctcagcctccaccaagggcccatcggtcttccccctggcaccctcctccaagagcacctctgggggcacagcggccctgggctgcctggtcaaggactacttccccgaaccggtgacggtgtcgtggaactcaggcgccctgaccagcggcgtgcacaccttcccggctgtcctacagtcctcaggactctactccctcagcagcgtggtgaccgtgccctccagcagcttgggcacccagacctacatctgcaacgtgaatcacaagcccagcaacaccaaggtggacaagaaagttgagcccaaatcttgtgacaaaactcacacatgcccaccgtgcccagcacctgaactcctggggggaccgtcagtcttcctcttccccccaaaacccaaggacaccctcatgatctcccggacccctgaggtcacatgcgtggtggtggacgtgagccacgaagaccctgaggtcaagttcaactggtacgtggacggcgtggaggtgcataatgccaagacaaagccgtgcgaggagcagtacggcagcacgtaccgttgcgtcagcgtcctcaccgtcctgcaccaggactggctgaatggcaaggagtacaagtgcaaggtgtccaacaaagccctcccagcccccatcgagaaaaccatctccaaagccaaagggcagccccgagaaccacaggtgtacaccctgcccccatcccgggaggagatgaccaagaaccaggtcagcctgacctgcctggtcaaaggcttctatcccagcgacatcgccgtggagtgggagagcaatgggcagccggagaacaactacaagaccacgcctcccgtgctggactccgacggctccttcttcctctatagcaagctcaccgtggacaagagcaggtggcagcaggggaacgtcttctcatgctccgtgatgcatgaggctctgcacaaccactacacgcagaagagcctctccctgtctccgggcaaatag

SEQ ID NO: 391 - protein, 451 aa, Artificial Sequence; identical to SEQ ID NO: 389
  Synthetic

SEQ ID NO: 392 - DNA, 1422 bp, Artificial Sequence; identical to SEQ ID NO: 390
  Synthetic

SEQ ID NO: 393 - protein, 451 aa, Artificial Sequence; identical to SEQ ID NO: 389
  Synthetic

SEQ ID NO: 394 - DNA, 1422 bp, Artificial Sequence; identical to SEQ ID NO: 390
  Synthetic

SEQ ID NO: 395 - protein, 451 aa, Artificial Sequence; identical to SEQ ID NO: 389
  Synthetic

SEQ ID NO: 396 - DNA, 1422 bp, Artificial Sequence; identical to SEQ ID NO: 390
  Synthetic

SEQ ID NO: 397 - protein, 451 aa, Artificial Sequence
  Synthetic
QVQLVQSGAEVKKPGASVKVSCKASGYTFNGYYIHWVRQAPGQGLEWMGWLNPNSGGANYAQKFQGRVTMTRDTSISTAYMELSRLTSDDTAVYYCARDQRKTTVTPFEYWGQGTLVTVSSASTKGPSVFPLAPSSKSTSGGTAALGCLVKDYFPEPVTVSWNSGALTSGVHTFPAVLQSSGLYSLSSVVTVPSSSLGTQTYICNVNHKPSNTKVDKKVEPKSCDKTHTCPPCPAPELLGGPSVFLFPPKPKDTLMISRTPEVTCVVVDVSHEDPEVKFNWYVDGVEVHNAKTKPCEEQYGSTYRCVSVLTVLHQDWLNGKEYKCKVSNKALPAPIEKTISKAKGQPREPQVYTLPPSREEMTKNQVSLTCLVKGFYPSDIAVEWESNGQPENNYKTTPPVLDSDGSFFLYSKLTVDKSRWQQGNVFSCSVMHEALHNHYTQKSLSLSPGK

SEQ ID NO: 398 - DNA, 1422 bp, Artificial Sequence
  Synthetic
atggacatgagggtgcccgctcagctcctggggctcctgctgctgtggctgagaggtgcgcgctgtcaggtgcagctggtgcagtctggggctgaggtgaagaagcctggggcctcagtgaaggtgtcctgcaaggcttctggatacaccttcaacggctactatatccactgggtgcgacaggcccctggacaagggcttgagtggatgggatggctcaacccaaacagtggtggcgcaaactatgcacagaagtttcagggccgtgtcaccatgaccagggacacgtccatcagcacagcctacatggagctgagcaggctgacatctgacgacacggccgtgtattactgtgcgagagatcagaggaagaccacggtgactccctttgagtactggggccagggaaccctggtcaccgtgtcctcagcctccaccaagggcccatcggtcttccccctggcaccctcctccaagagcacctctgggggcacagcggccctgggctgcctggtcaaggactacttccccgaaccggtgacggtgtcgtggaactcaggcgccctgaccagcggcgtgcacaccttcccggctgtcctacagtcctcaggactctactccctcagcagcgtggtgaccgtgccctccagcagcttgggcacccagacctacatctgcaacgtgaatcacaagcccagcaacaccaaggtggacaagaaagttgagcccaaatcttgtgacaaaactcacacatgcccaccgtgcccagcacctgaactcctggggggaccgtcagtcttcctcttccccccaaaacccaaggacaccctcatgatctcccggacccctgaggtcacatgcgtggtggtggacgtgagccacgaagaccctgaggtcaagttcaactggtacgtggacggcgtggaggtgcataatgccaagacaaagccgtgcgaggagcagtacggcagcacgtaccgttgcgtcagcgtcctcaccgtcctgcaccaggactggctgaatggcaaggagtacaagtgcaaggtgtccaacaaagccctcccagcccccatcgagaaaaccatctccaaagccaaagggcagccccgagaaccacaggtgtacaccctgcccccatcccgggaggagatgaccaagaaccaggtcagcctgacctgcctggtcaaaggcttctatcccagcgacatcgccgtggagtgggagagcaatgggcagccggagaacaactacaagaccacgcctcccgtgctggactccgacggctccttcttcctctatagcaagctcaccgtggacaagagcaggtggcagcaggggaacgtcttctcatgctccgtgatgcatgaggctctgcacaaccactacacgcagaagagcctctccctgtctccgggcaaatag

SEQ ID NO: 399 - protein, 449 aa, Artificial Sequence; identical to SEQ ID NO: 289
  Synthetic

SEQ ID NO: 400 - DNA, 1416 bp, Artificial Sequence; identical to SEQ ID NO: 290
  Synthetic

SEQ ID NO: 401 - protein, 449 aa, Artificial Sequence; identical to SEQ ID NO: 289
  Synthetic

SEQ ID NO: 402 - DNA, 1416 bp, Artificial Sequence; identical to SEQ ID NO: 290
  Synthetic

SEQ ID NO: 403 - protein, 449 aa, Artificial Sequence; identical to SEQ ID NO: 289
  Synthetic

SEQ ID NO: 404 - DNA, 1416 bp, Artificial Sequence; identical to SEQ ID NO: 290
  Synthetic

SEQ ID NO: 405 - protein, 449 aa, Artificial Sequence; identical to SEQ ID NO: 289
  Synthetic

SEQ ID NO: 406 - DNA, 1416 bp, Artificial Sequence; identical to SEQ ID NO: 290
  Synthetic

SEQ ID NO: 407 - protein, 449 aa, Artificial Sequence; identical to SEQ ID NO: 289
  Synthetic

SEQ ID NO: 408 - DNA, 1416 bp, Artificial Sequence; identical to SEQ ID NO: 290
  Synthetic

SEQ ID NO: 409 - protein, 622 aa, Artificial Sequence
  Synthetic
QVQLVQSGAEVTKPGASVKVSCKASGYTFTRYDINWVRQATGQGLEWMGWMNPNSGNSGSVQKFRGRVTMTRDTSITTVYMELSSLRSDDTAVYYCARGGISSSWHWAFDIWGQGTMVTVSSASTKGPSVFPLAPSSKSTSGGTAALGCLVKDYFPEPVTVSWNSGALTSGVHTFPAVLQSSGLYSLSSVVTVPSSSLGTQTYICNVNHKPSNTKVDKKVEPKSCDKTHTCPPCPAPELLGGPSVFLFPPKPKDTLMISRTPEVTCVVVDVSHEDPEVKFNWYVDGVEVHNAKTKPCEEQYGSTYRCVSVLTVLHQDWLNGKEYKCKVSNKALPAPIEKTISKAKGQPREPQVYTLPPSREEMTKNQVSLTCLVKGFYPSDIAVEWESNGQPENNYKTTPPVLDSDGSFFLYSKLTVDKSRWQQGNVFSCSVMHEALHNHYTQKSLSLSPGGGGGSSPGQGTQSENSCTHYPGNLPNMLRDLRDAFSRVKTFFQMKDQLDNKLLKESLLEDFKGYLGCQALSEMIQFYLEEVMPQAENQDPDIKAHVNSLGENLKTLRLRLRRCHRFLPCENGGGSGGKSKAVEQVKNAFNKLQEKGIYKAMSEFDIFINYIEAYMTMKIRN

SEQ ID NO: 410 - protein, 214 aa, Artificial Sequence
  Synthetic
DIQMTQSPSSLSASVGDRVTITCQASQDINNHLNWYQQKPGKAPKLLIYGAYTLETGVPSRFSGSGSGTDFTFTISSLQPEDIATYYCQQYDKLPLTFGGGTKVEIKRTVAAPSVFIFPPSDEQLKSGTASVVCLLNNFYPREAKVQWKVDNALQSGNSQESVTEQDSKDSTYSLSSTLTLSKADYEKHKVYACEVTHQGLSSPVTKSFNRGEC

SEQ ID NO: 411 - protein, 449 aa, Artificial Sequence
  Synthetic
EVQVLESGGGLVQPGGSLRLSCAASGFTFNAYAMSWVRQAPGKGLEWVSTISGSGSTTYYADSVKGRFTISRDNSKNTLDLQMNSLRAADTAVYYCAKVAGSNFFFDHWGQGTLVTVSSASTKGPSVFPLAPSSKSTSGGTAALGCLVKDYFPEPVTVSWNSGALTSGVHTFPAVLQSSGLYSLSSVVTVPSSSLGTQTYICNVNHKPSNTKVDKKVEPKSCDKTHTCPPCPAPELLGGPSVFLFPPKPKDTLMISRTPEVTCVVVDVSHEDPEVKFNWYVDGVEVHNAKTKPCEEQYGSTYRCVSVLTVLHQDWLNGKEYKCKVSNKALPAPIEKTISKAKGQPREPQVYTLPPSREEMTKNQVSLTCLVKGFYPSDIAVEWESNGQPENNYKTTPPVLDSDGSFFLYSKLTVDKSRWQQGNVFSCSVMHEALHNHYTQKSLSLSPGK

SEQ ID NO: 412 - DNA, 1416 bp, Artificial Sequence; identical to SEQ ID NO: 284
  Synthetic

SEQ ID NO: 413 - protein, 449 aa, Artificial Sequence; identical to SEQ ID NO: 411
  Synthetic

SEQ ID NO: 414 - DNA, 1416 bp, Artificial Sequence; identical to SEQ ID NO: 284
  Synthetic

SEQ ID NO: 415 - protein, 449 aa, Artificial Sequence; identical to SEQ ID NO: 411
  Synthetic

SEQ ID NO: 416 - DNA, 1416 bp, Artificial Sequence; identical to SEQ ID NO: 284
  Synthetic

SEQ ID NO: 417 - protein, 449 aa, Artificial Sequence; identical to SEQ ID NO: 411
  Synthetic

SEQ ID NO: 418 - DNA, 1416 bp, Artificial Sequence; identical to SEQ ID NO: 284
  Synthetic

SEQ ID NO: 419 - protein, 449 aa, Artificial Sequence; identical to SEQ ID NO: 411
  Synthetic

SEQ ID NO: 420 - DNA, 1416 bp, Artificial Sequence; identical to SEQ ID NO: 284
  Synthetic

SEQ ID NO: 421 - protein, 449 aa, Artificial Sequence; identical to SEQ ID NO: 411
  Synthetic

SEQ ID NO: 422 - DNA, 1416 bp, Artificial Sequence; identical to SEQ ID NO: 284
  Synthetic

SEQ ID NO: 423 - protein, 449 aa, Artificial Sequence; identical to SEQ ID NO: 411
  Synthetic

SEQ ID NO: 424 - DNA, 1416 bp, Artificial Sequence; identical to SEQ ID NO: 284
  Synthetic

SEQ ID NO: 425 - protein, 449 aa, Artificial Sequence; identical to SEQ ID NO: 411
  Synthetic

SEQ ID NO: 426 - DNA, 1416 bp, Artificial Sequence; identical to SEQ ID NO: 284
  Synthetic

SEQ ID NO: 427 - protein, 449 aa, Artificial Sequence; identical to SEQ ID NO: 411
  Synthetic

SEQ ID NO: 428 - DNA, 1416 bp, Artificial Sequence; identical to SEQ ID NO: 284
  Synthetic

SEQ ID NO: 429 - protein, 449 aa, Artificial Sequence; identical to SEQ ID NO: 411
  Synthetic

SEQ ID NO: 430 - DNA, 1416 bp, Artificial Sequence; identical to SEQ ID NO: 284
  Synthetic

SEQ ID NO: 431 - protein, 449 aa, Artificial Sequence
  Synthetic
EVQLLESGGGLVQPGGSLRLSCAASGFTFNAYAMSWVRQAPGKGLEWVSTISGSGSTTYYADSVKGRFTISRDNSKNTLDLQMNSLRAEDTAVYYCAKVAGSNFFFDHWGQGTLVTVSSASTKGPSVFPLAPSSKSTSGGTAALGCLVKDYFPEPVTVSWNSGALTSGVHTFPAVLQSSGLYSLSSVVTVPSSSLGTQTYICNVNHKPSNTKVDKKVEPKSCDKTHTCPPCPAPELLGGPSVFLFPPKPKDTLMISRTPEVTCVVVDVSHEDPEVKFNWYVDGVEVHNAKTKPCEEQYGSTYRCVSVLTVLHQDWLNGKEYKCKVSNKALPAPIEKTISKAKGQPREPQVYTLPPSREEMTKNQVSLTCLVKGFYPSDIAVEWESNGQPENNYKTTPPVLDSDGSFFLYSKLTVDKSRWQQGNVFSCSVMHEALHNHYTQKSLSLSPGK

SEQ ID NO: 432 - DNA, 1416 bp, Artificial Sequence; identical to SEQ ID NO: 284
  Synthetic

SEQ ID NO: 433 - protein, 449 aa, Artificial Sequence; identical to SEQ ID NO: 431
  Synthetic

SEQ ID NO: 434 - DNA, 1416 bp, Artificial Sequence; identical to SEQ ID NO: 284
  Synthetic

SEQ ID NO: 435 - protein, 449 aa, Artificial Sequence; identical to SEQ ID NO: 431
  Synthetic

SEQ ID NO: 436 - DNA, 1416 bp, Artificial Sequence; identical to SEQ ID NO: 284
  Synthetic

SEQ ID NO: 437 - protein, 449 aa, Artificial Sequence; identical to SEQ ID NO: 431
  Synthetic

SEQ ID NO: 438 - DNA, 1416 bp, Artificial Sequence; identical to SEQ ID NO: 284
  Synthetic

SEQ ID NO: 439 - protein, 449 aa, Artificial Sequence; identical to SEQ ID NO: 431
  Synthetic

SEQ ID NO: 440 - DNA, 1416 bp, Artificial Sequence; identical to SEQ ID NO: 284
  Synthetic

SEQ ID NO: 441 - protein, 449 aa, Artificial Sequence; identical to SEQ ID NO: 431
  Synthetic

SEQ ID NO: 442 - DNA, 1416 bp, Artificial Sequence; identical to SEQ ID NO: 284
  Synthetic

SEQ ID NO: 443 - protein, 449 aa, Artificial Sequence; identical to SEQ ID NO: 431
  Synthetic

SEQ ID NO: 444 - DNA, 1416 bp, Artificial Sequence; identical to SEQ ID NO: 284
  Synthetic

SEQ ID NO: 445 - protein, 449 aa, Artificial Sequence; identical to SEQ ID NO: 431
  Synthetic

SEQ ID NO: 446 - DNA, 1416 bp, Artificial Sequence; identical to SEQ ID NO: 284
  Synthetic

SEQ ID NO: 447 - protein, 449 aa, Artificial Sequence; identical to SEQ ID NO: 431
  Synthetic

SEQ ID NO: 448 - DNA, 1416 bp, Artificial Sequence; identical to SEQ ID NO: 284
  Synthetic

SEQ ID NO: 449 - protein, 449 aa, Artificial Sequence; identical to SEQ ID NO: 431
  Synthetic

SEQ ID NO: 450 - DNA, 1416 bp, Artificial Sequence; identical to SEQ ID NO: 284
  Synthetic

SEQ ID NO: 451 - protein, 449 aa, Artificial Sequence; identical to SEQ ID NO: 431
  Synthetic

SEQ ID NO: 452 - DNA, 1416 bp, Artificial Sequence; identical to SEQ ID NO: 284
  Synthetic

SEQ ID NO: 453 - protein, 449 aa, Artificial Sequence; identical to SEQ ID NO: 431
  Synthetic

SEQ ID NO: 454 - DNA, 1416 bp, Artificial Sequence; identical to SEQ ID NO: 284
  Synthetic

SEQ ID NO: 455 - protein, 449 aa, Artificial Sequence; identical to SEQ ID NO: 431
  Synthetic

SEQ ID NO: 456 - DNA, 1416 bp, Artificial Sequence; identical to SEQ ID NO: 284
  Synthetic

SEQ ID NO: 457 - protein, 449 aa, Artificial Sequence; identical to SEQ ID NO: 291
  Synthetic

SEQ ID NO: 458 - DNA, 1416 bp, Artificial Sequence; identical to SEQ ID NO: 284
  Synthetic

SEQ ID NO: 459 - protein, 449 aa, Artificial Sequence; identical to SEQ ID NO: 291
  Synthetic

SEQ ID NO: 460 - DNA, 1416 bp, Artificial Sequence; identical to SEQ ID NO: 284
  Synthetic

SEQ ID NO: 461 - protein, 449 aa, Artificial Sequence; identical to SEQ ID NO: 291
  Synthetic

SEQ ID NO: 462 - DNA, 1416 bp, Artificial Sequence; identical to SEQ ID NO: 284
  Synthetic

SEQ ID NO: 463 - protein, 449 aa, Artificial Sequence; identical to SEQ ID NO: 291
  Synthetic

SEQ ID NO: 464 - DNA, 1416 bp, Artificial Sequence; identical to SEQ ID NO: 284
  Synthetic

SEQ ID NO: 465 - protein, 449 aa, Artificial Sequence; identical to SEQ ID NO: 291
  Synthetic

SEQ ID NO: 466 - DNA, 1416 bp, Artificial Sequence; identical to SEQ ID NO: 284
  Synthetic

SEQ ID NO: 467 - protein, 449 aa, Artificial Sequence; identical to SEQ ID NO: 291
  Synthetic

SEQ ID NO: 468 - DNA, 1416 bp, Artificial Sequence; identical to SEQ ID NO: 284
  Synthetic

SEQ ID NO: 469 - protein, 449 aa, Artificial Sequence; identical to SEQ ID NO: 291
  Synthetic

SEQ ID NO: 470 - DNA, 1416 bp, Artificial Sequence; identical to SEQ ID NO: 284
  Synthetic

SEQ ID NO: 471 - protein, 449 aa, Artificial Sequence; identical to SEQ ID NO: 291
  Synthetic

SEQ ID NO: 472 - DNA, 1416 bp, Artificial Sequence; identical to SEQ ID NO: 284
  Synthetic

SEQ ID NO: 473 - protein, 449 aa, Artificial Sequence; identical to SEQ ID NO: 291
  Synthetic

SEQ ID NO: 474 - DNA, 1416 bp, Artificial Sequence; identical to SEQ ID NO: 284
  Synthetic

SEQ ID NO: 475 - protein, 449 aa, Artificial Sequence
  Synthetic
EVQLLESGGGLVQPGGSLRLSCAVSGFTFSRYAMSWVRQAPGKGLEWVSEMRGSSGSTYYADSVKGRFTISRDNSKNTLYLQMNSLRVEDTAIYYCAKEFSSNSLFDYWGQGTLVTVSSASTKGPSVFPLAPSSKSTSGGTAALGCLVKDYFPEPVTVSWNSGALTSGVHTFPAVLQSSGLYSLSSVVTVPSSSLGTQTYICNVNHKPSNTKVDKKVEPKSCDKTHTCPPCPAPELLGGPSVFLFPPKPKDTLMISRTPEVTCVVVDVSHEDPEVKFNWYVDGVEVHNAKTKPCEEQYGSTYRCVSVLTVLHQDWLNGKEYKCKVSNKALPAPIEKTISKAKGQPREPQVYTLPPSREEMTKNQVSLTCLVKGFYPSDIAVEWESNGQPENNYKTTPPVLDSDGSFFLYSKLTVDKSRWQQGNVFSCSVMHEALHNHYTQKSLSLSPGK

SEQ ID NO: 476 - DNA, 1416 bp, Artificial Sequence; identical to SEQ ID NO: 284
  Synthetic

SEQ ID NO: 477 - protein, 449 aa, Artificial Sequence; identical to SEQ ID NO: 475
  Synthetic

SEQ ID NO: 478 - DNA, 1416 bp, Artificial Sequence; identical to SEQ ID NO: 284
  Synthetic

SEQ ID NO: 479 - protein, 449 aa, Artificial Sequence; identical to SEQ ID NO: 475
  Synthetic

SEQ ID NO: 480 - DNA, 1416 bp, Artificial Sequence; identical to SEQ ID NO: 284
  Synthetic

SEQ ID NO: 481 - protein, 449 aa, Artificial Sequence; identical to SEQ ID NO: 475
  Synthetic

SEQ ID NO: 482 - DNA, 1416 bp, Artificial Sequence; identical to SEQ ID NO: 284
  Synthetic

SEQ ID NO: 483 - protein, 449 aa, Artificial Sequence; identical to SEQ ID NO: 475
  Synthetic

SEQ ID NO: 484 - DNA, 1416 bp, Artificial Sequence; identical to SEQ ID NO: 284
  Synthetic

SEQ ID NO: 485 - protein, 449 aa, Artificial Sequence; identical to SEQ ID NO: 475
  Synthetic

SEQ ID NO: 486 - DNA, 1416 bp, Artificial Sequence; identical to SEQ ID NO: 284
  Synthetic

SEQ ID NO: 487 - protein, 449 aa, Artificial Sequence; identical to SEQ ID NO: 475
  Synthetic

SEQ ID NO: 488 - DNA, 1416 bp, Artificial Sequence; identical to SEQ ID NO: 284
  Synthetic

SEQ ID NO: 489 - protein, 449 aa, Artificial Sequence; identical to SEQ ID NO: 475
  Synthetic

SEQ ID NO: 490 - DNA, 1416 bp, Artificial Sequence; identical to SEQ ID NO: 284
  Synthetic

SEQ ID NO: 491 - protein, 449 aa, Artificial Sequence; identical to SEQ ID NO: 475
  Synthetic

SEQ ID NO: 492 - DNA, 1416 bp, Artificial Sequence; identical to SEQ ID NO: 284
  Synthetic

SEQ ID NO: 493 - protein, 449 aa, Artificial Sequence; identical to SEQ ID NO: 475
  Synthetic

SEQ ID NO: 494 - DNA, 1416 bp, Artificial Sequence; identical to SEQ ID NO: 284
  Synthetic

SEQ ID NO: 495 - protein, 449 aa, Artificial Sequence; identical to SEQ ID NO: 475
  Synthetic

SEQ ID NO: 496 - DNA, 1416 bp, Artificial Sequence; identical to SEQ ID NO: 284
  Synthetic

SEQ ID NO: 497 - protein, 449 aa, Artificial Sequence; identical to SEQ ID NO: 475
  Synthetic

SEQ ID NO: 498 - DNA, 1416 bp, Artificial Sequence; identical to SEQ ID NO: 284
  Synthetic

SEQ ID NO: 499 - protein, 449 aa, Artificial Sequence; identical to SEQ ID NO: 475
  Synthetic

SEQ ID NO: 500 - DNA, 1416 bp, Artificial Sequence; identical to SEQ ID NO: 284
  Synthetic

SEQ ID NO: 501 - protein, 446 aa, Artificial Sequence
  Synthetic
EVQLVESGGGLVQPGGSLRLSCAASGFTFSSNWMSWVRQAPGKGLDWVASMKQDGSEIYYVDSVKGRFTISRDNAKNSLHLQMNSLRAEDTAVYYCVRGGWRFESWGQGTLVTVSSASTKGPSVFPLAPSSKSTSGGTAALGCLVKDYFPEPVTVSWNSGALTSGVHTFPAVLQSSGLYSLSSVVTVPSSSLGTQTYICNVNHKPSNTKVDKKVEPKSCDKTHTCPPCPAPELLGGPSVFLFPPKPKDTLMISRTPEVTCVVVDVSHEDPEVKFNWYVDGVEVHNAKTKPCEEQYGSTYRCVSVLTVLHQDWLNGKEYKCKVSNKALPAPIEKTISKAKGQPREPQVYTLPPSREEMTKNQVSLTCLVKGFYPSDIAVEWESNGQPENNYKTTPPVLDSDGSFFLYSKLTVDKSRWQQGNVFSCSVMHEALHNHYTQKSLSLSPGK

SEQ ID NO: 502 - DNA, 1416 bp, Artificial Sequence; identical to SEQ ID NO: 284
  Synthetic

SEQ ID NO: 503 - protein, 446 aa, Artificial Sequence; identical to SEQ ID NO: 501
  Synthetic

SEQ ID NO: 504 - DNA, 1416 bp, Artificial Sequence; identical to SEQ ID NO: 284
  Synthetic

SEQ ID NO: 505 - protein, 446 aa, Artificial Sequence; identical to SEQ ID NO: 501
  Synthetic

SEQ ID NO: 506 - DNA, 1416 bp, Artificial Sequence; identical to SEQ ID NO: 284
  Synthetic

SEQ ID NO: 507 - protein, 446 aa, Artificial Sequence
  Synthetic
EVQLVESGGGLVQPGGSLRLSCAASGFTFSSNWMSWVRQAPGKGLDWVASIKQDGSEIYYVDSVKGRFTISRDNAKNSLHLQMNSLRAEDTAVYYCVRGGWRFESWGQGTLVTVSSASTKGPSVFPLAPSSKSTSGGTAALGCLVKDYFPEPVTVSWNSGALTSGVHTFPAVLQSSGLYSLSSVVTVPSSSLGTQTYICNVNHKPSNTKVDKKVEPKSCDKTHTCPPCPAPELLGGPSVFLFPPKPKDTLMISRTPEVTCVVVDVSHEDPEVKFNWYVDGVEVHNAKTKPCEEQYGSTYRCVSVLTVLHQDWLNGKEYKCKVSNKALPAPIEKTISKAKGQPREPQVYTLPPSREEMTKNQVSLTCLVKGFYPSDIAVEWESNGQPENNYKTTPPVLDSDGSFFLYSKLTVDKSRWQQGNVFSCSVMHEALHNHYTQKSLSLSPGK

SEQ ID NO: 508 - DNA, 1416 bp, Artificial Sequence; identical to SEQ ID NO: 284
  Synthetic

SEQ ID NO: 509 - protein, 446 aa, Artificial Sequence; identical to SEQ ID NO: 501
  Synthetic

SEQ ID NO: 510 - DNA, 1416 bp, Artificial Sequence; identical to SEQ ID NO: 284
  Synthetic

SEQ ID NO: 511 - protein, 446 aa, Artificial Sequence
  Synthetic
EVQLVESGGGLVQPGGSLRLSCAASGFTFSSNWMSWVRQAPGKGLDWVASMKQHGSEIYYVDSVKGRFTISRDNAKNSLHLQMNSLRAEDTAVYYCVRGGWRFESWGQGTLVTVSSASTKGPSVFPLAPSSKSTSGGTAALGCLVKDYFPEPVTVSWNSGALTSGVHTFPAVLQSSGLYSLSSVVTVPSSSLGTQTYICNVNHKPSNTKVDKKVEPKSCDKTHTCPPCPAPELLGGPSVFLFPPKPKDTLMISRTPEVTCVVVDVSHEDPEVKFNWYVDGVEVHNAKTKPCEEQYGSTYRCVSVLTVLHQDWLNGKEYKCKVSNKALPAPIEKTISKAKGQPREPQVYTLPPSREEMTKNQVSLTCLVKGFYPSDIAVEWESNGQPENNYKTTPPVLDSDGSFFLYSKLTVDKSRWQQGNVFSCSVMHEALHNHYTQKSLSLSPGK

SEQ ID NO: 512 - DNA, 1416 bp, Artificial Sequence; identical to SEQ ID NO: 284
  Synthetic

SEQ ID NO: 513 - protein, 446 aa, Artificial Sequence
  Synthetic
EVQLVESGGGLVQPGGSLRLSCAASGFTFSSNWMSWVRQAPGKGLDWVASMKQDASEIYYVDSVKGRFTISRDNAKNSLHLQMNSLRAEDTAVYYCVRGGWRFESWGQGTLVTVSSASTKGPSVFPLAPSSKSTSGGTAALGCLVKDYFPEPVTVSWNSGALTSGVHTFPAVLQSSGLYSLSSVVTVPSSSLGTQTYICNVNHKPSNTKVDKKVEPKSCDKTHTCPPCPAPELLGGPSVFLFPPKPKDTLMISRTPEVTCVVVDVSHEDPEVKFNWYVDGVEVHNAKTKPCEEQYGSTYRCVSVLTVLHQDWLNGKEYKCKVSNKALPAPIEKTISKAKGQPREPQVYTLPPSREEMTKNQVSLTCLVKGFYPSDIAVEWESNGQPENNYKTTPPVLDSDGSFFLYSKLTVDKSRWQQGNVFSCSVMHEALHNHYTQKSLSLSPGK

SEQ ID NO: 514 - DNA, 1416 bp, Artificial Sequence; identical to SEQ ID NO: 284
  Synthetic

SEQ ID NO: 515 - protein, 446 aa, Artificial Sequence
  Synthetic
EVQLVESGGGLVQPGGSLRLSCAASGFTFSSNWMSWVRQAPGKGLDWVASMKQDLSEIYYVDSVKGRFTISRDNAKNSLHLQMNSLRAEDTAVYYCVRGGWRFESWGQGTLVTVSSASTKGPSVFPLAPSSKSTSGGTAALGCLVKDYFPEPVTVSWNSGALTSGVHTFPAVLQSSGLYSLSSVVTVPSSSLGTQTYICNVNHKPSNTKVDKKVEPKSCDKTHTCPPCPAPELLGGPSVFLFPPKPKDTLMISRTPEVTCVVVDVSHEDPEVKFNWYVDGVEVHNAKTKPCEEQYGSTYRCVSVLTVLHQDWLNGKEYKCKVSNKALPAPIEKTISKAKGQPREPQVYTLPPSREEMTKNQVSLTCLVKGFYPSDIAVEWESNGQPENNYKTTPPVLDSDGSFFLYSKLTVDKSRWQQGNVFSCSVMHEALHNHYTQKSLSLSPGK

SEQ ID NO: 516 - DNA, 1416 bp, Artificial Sequence; identical to SEQ ID NO: 284
  Synthetic

SEQ ID NO: 517 - protein, 446 aa, Artificial Sequence
  Synthetic
EVQLVESGGGLVQPGGSLRLSCAASGFTFSSNWMSWVRQAPGKGLDWVASMKQDGSEIYYVESVKGRFTISRDNAKNSLHLQMNSLRAEDTAVYYCVRGGWRFESWGQGTLVTVSSASTKGPSVFPLAPSSKSTSGGTAALGCLVKDYFPEPVTVSWNSGALTSGVHTFPAVLQSSGLYSLSSVVTVPSSSLGTQTYICNVNHKPSNTKVDKKVEPKSCDKTHTCPPCPAPELLGGPSVFLFPPKPKDTLMISRTPEVTCVVVDVSHEDPEVKFNWYVDGVEVHNAKTKPCEEQYGSTYRCVSVLTVLHQDWLNGKEYKCKVSNKALPAPIEKTISKAKGQPREPQVYTLPPSREEMTKNQVSLTCLVKGFYPSDIAVEWESNGQPENNYKTTPPVLDSDGSFFLYSKLTVDKSRWQQGNVFSCSVMHEALHNHYTQKSLSLSPGK

SEQ ID NO: 518 - DNA, 1416 bp, Artificial Sequence; identical to SEQ ID NO: 284
  Synthetic

SEQ ID NO: 519 - protein, 446 aa, Artificial Sequence
  Synthetic
EVQLVESGGGLVQPGGSLRLSCAASGFTFSSNWMSWVRQAPGKGLDWVASIKQDASEIYYVDAVKGRFTISRDNAKNSLHLQMNSLRAEDTAVYYCVRGGWRFESWGQGTLVTVSSASTKGPSVFPLAPSSKSTSGGTAALGCLVKDYFPEPVTVSWNSGALTSGVHTFPAVLQSSGLYSLSSVVTVPSSSLGTQTYICNVNHKPSNTKVDKKVEPKSCDKTHTCPPCPAPELLGGPSVFLFPPKPKDTLMISRTPEVTCVVVDVSHEDPEVKFNWYVDGVEVHNAKTKPCEEQYGSTYRCVSVLTVLHQDWLNGKEYKCKVSNKALPAPIEKTISKAKGQPREPQVYTLPPSREEMTKNQVSLTCLVKGFYPSDIAVEWESNGQPENNYKTTPPVLDSDGSFFLYSKLTVDKSRWQQGNVFSCSVMHEALHNHYTQKSLSLSPGK

SEQ ID NO: 520 - DNA, 1416 bp, Artificial Sequence; identical to SEQ ID NO: 284
  Synthetic

SEQ ID NO: 521 - protein, 446 aa, Artificial Sequence; identical to SEQ ID NO: 519
  Synthetic

SEQ ID NO: 522 - DNA, 1416 bp, Artificial Sequence; identical to SEQ ID NO: 284
  Synthetic

SEQ ID NO: 523 - protein, 446 aa, Artificial Sequence; identical to SEQ ID NO: 519
  Synthetic

SEQ ID NO: 524 - DNA, 1416 bp, Artificial Sequence; identical to SEQ ID NO: 284
  Synthetic

SEQ ID NO: 525 - protein, 446 aa, Artificial Sequence; identical to SEQ ID NO: 519
  Synthetic

SEQ ID NO: 526 - DNA, 1416 bp, Artificial Sequence; identical to SEQ ID NO: 284
  Synthetic

SEQ ID NO: 527 - protein, 446 aa, Artificial Sequence
  Synthetic
EVQLVESGGGLVQPGGSLRLSCAASGFTFSSNWMSWVRQAPGKGLDWVASIKQDASEIYYVESVKGRFTISRDNAKNSLHLQMNSLRAEDTAVYYCVRGGWRFESWGQGTLVTVSSASTKGPSVFPLAPSSKSTSGGTAALGCLVKDYFPEPVTVSWNSGALTSGVHTFPAVLQSSGLYSLSSVVTVPSSSLGTQTYICNVNHKPSNTKVDKKVEPKSCDKTHTCPPCPAPELLGGPSVFLFPPKPKDTLMISRTPEVTCVVVDVSHEDPEVKFNWYVDGVEVHNAKTKPCEEQYGSTYRCVSVLTVLHQDWLNGKEYKCKVSNKALPAPIEKTISKAKGQPREPQVYTLPPSREEMTKNQVSLTCLVKGFYPSDIAVEWESNGQPENNYKTTPPVLDSDGSFFLYSKLTVDKSRWQQGNVFSCSVMHEALHNHYTQKSLSLSPGK

SEQ ID NO: 528 - DNA, 1416 bp, Artificial Sequence; identical to SEQ ID NO: 284
  Synthetic

SEQ ID NO: 529 - protein, 446 aa, Artificial Sequence; identical to SEQ ID NO: 527
  Synthetic

SEQ ID NO: 530 - DNA, 1416 bp, Artificial Sequence; identical to SEQ ID NO: 284
  Synthetic

SEQ ID NO: 531 - protein, 446 aa, Artificial Sequence; identical to SEQ ID NO: 527
  Synthetic

SEQ ID NO: 532 - DNA, 1416 bp, Artificial Sequence; identical to SEQ ID NO: 284
  Synthetic

SEQ ID NO: 533 - protein, 446 aa, Artificial Sequence; identical to SEQ ID NO: 527
  Synthetic

SEQ ID NO: 534 - DNA, 1416 bp, Artificial Sequence; identical to SEQ ID NO: 284
  Synthetic

SEQ ID NO: 535 - protein, 446 aa, Artificial Sequence
  Synthetic
EVQLVESGGGLVQPGGSLRLSCAASGFTFSSNWMSWVRQAPGKGLDWVASMKQDGSEIYYVDAVKGRFTISRDNAKNSLHLQMNSLRAEDTAVYYCVRGGWRFESWGQGTLVTVSSASTKGPSVFPLAPSSKSTSGGTAALGCLVKDYFPEPVTVSWNSGALTSGVHTFPAVLQSSGLYSLSSVVTVPSSSLGTQTYICNVNHKPSNTKVDKKVEPKSCDKTHTCPPCPAPELLGGPSVFLFPPKPKDTLMISRTPEVTCVVVDVSHEDPEVKFNWYVDGVEVHNAKTKPCEEQYGSTYRCVSVLTVLHQDWLNGKEYKCKVSNKALPAPIEKTISKAKGQPREPQVYTLPPSREEMTKNQVSLTCLVKGFYPSDIAVEWESNGQPENNYKTTPPVLDSDGSFFLYSKLTVDKSRWQQGNVFSCSVMHEALHNHYTQKSLSLSPGK

SEQ ID NO: 536 - DNA, 1416 bp, Artificial Sequence; identical to SEQ ID NO: 284
  Synthetic

SEQ ID NO: 537 - DNA, 639 bp, Artificial Sequence
  Synthetic
tcctatgagctgactcagtcaccctcagtgtccgtgtccccaggacagacagccagcatcacctgctctggagatcaattggggtataaatatgcttgctggtatcagcagaagccaggccagtcccctgtgctggtcatctatcaagatagcaggcgaccctcagggatccctgagcgattctctggctccaactctgggaacacagccactctgaccatcagcgggacccaggctatggatgaggctgtctatttctgtcaggcgtgggacagcaccactgtggtattcggcggagggaccaaactgaccgtcctaagtcagcccaaggctgcaccctcggtcactctgttcccgccctcctctgaggagcttcaagccaacaaggccacactggtgtgtctcatcagtgacttctacccgggagccgtgacagtggcctggaaggcagatagcagccccgtcaaggcgggagtggaaaccaccacaccctccaaacaaagcaacaacaagtacgcggccagcagctatctgagcctgacgcctgagcagtggaagtcccacagaagctacagctgccaggtcacgcatgaagggagcaccgtggagaagacagtggcccctacagaatgttcatag

SEQ ID NO: 538 - DNA, 1356 bp, Artificial Sequence
  Synthetic
caggtgcagctgcaggcgtcgggcccaggactgatgaagccttcacagaccctgtccctcacctgcactgtctctggtggctccatcagcagtggtgtttactactggagctggatccgccagaacccagggaagggcctggagtggattggatacatctattacagtgggaccacttactacaatccgtccctcaagagtcgagttaccatctcaatcgacacgtctaagaaccagttctccctgaagctgagctctgtgactgccgcggacacggccgtgtattactgtgcgaggggagtgaccacggtggtccctgatgcttttgatatctggggccaagggacaatggtcaccgtgtcttcagcctccaccaagggcccatcggtcttccccctggcaccctcctccaagagcacctctgggggcacagcggccctgggctgcctggtcaaggactacttccccgaaccggtgacggtgtcgtggaactcaggcgccctgaccagcggcgtgcacaccttcccggctgtcctacagtcctcaggactctactccctcagcagcgtggtgaccgtgccctccagcagcttgggcacccagacctacatctgcaacgtgaatcacaagcccagcaacaccaaggtggacaagaaagttgagcccaaatcttgtgacaaaactcacacatgcccaccgtgcccagcacctgaactcctggggggaccgtcagtcttcctcttccccccaaaacccaaggacaccctcatgatctcccggacccctgaggtcacatgcgtggtggtggacgtgagccacgaagaccctgaggtcaagttcaactggtacgtggacggcgtggaggtgcataatgccaagacaaagccgtgcgaggagcagtacggcagcacgtaccgttgcgtcagcgtcctcaccgtcctgcaccaggactggctgaatggcaaggagtacaagtgcaaggtgtccaacaaagccctcccagcccccatcgagaaaaccatctccaaagccaaagggcagccccgagaaccacaggtgtacaccctgcccccatcccgggaggagatgaccaagaaccaggtcagcctgacctgcctggtcaaaggcttctatcccagcgacatcgccgtggagtgggagagcaatgggcagccggagaacaactacaagaccacgcctcccgtgctggactccgacggctccttcttcctctatagcaagctcaccgtggacaagagcaggtggcagcaggggaacgtcttctcatgctccgtgatgcatgaggctctgcacaaccactacacgcagaagagcctctccctgtctccgggctag

SEQ ID NO: 539 - protein, 212 aa, Artificial Sequence
  Synthetic
SYELTQSPSVSVSPGQTASITCSGDQLGYKYACWYQQKPGQSPVLVIYQDSRRPSGIPERFSGSNSGNTATLTISGTQAMDEAVYFCQAWDSTTVVFGGGTKLTVLSQPKAAPSVTLFPPSSEELQANKATLVCLISDFYPGAVTVAWKADSSPVKAGVETTTPSKQSNNKYAASSYLSLTPEQWKSHRSYSCQVTHEGSTVEKTVAPTECS

SEQ ID NO: 540 - protein, 451 aa, Artificial Sequence
  Synthetic
QVQLQASGPGLMKPSQTLSLTCTVSGGSISSGVYYWSWIRQNPGKGLEWIGYIYYSGTTYYNPSLKSRVTISIDTSKNQFSLKLSSVTAADTAVYYCARGVTTVVPDAFDIWGQGTMVTVSSASTKGPSVFPLAPSSKSTSGGTAALGCLVKDYFPEPVTVSWNSGALTSGVHTFPAVLQSSGLYSLSSVVTVPSSSLGTQTYICNVNHKPSNTKVDKKVEPKSCDKTHTCPPCPAPELLGGPSVFLFPPKPKDTLMISRTPEVTCVVVDVSHEDPEVKFNWYVDGVEVHNAKTKPCEEQYGSTYRCVSVLTVLHQDWLNGKEYKCKVSNKALPAPIEKTISKAKGQPREPQVYTLPPSREEMTKNQVSLTCLVKGFYPSDIAVEWESNGQPENNYKTTPPVLDSDGSFFLYSKLTVDKSRWQQGNVFSCSVMHEALHNHYTQKSLSLSPG

SEQ ID NO: 541-543 - skipped (3 entries)

SEQ ID NO: 544 - protein, 11 aa, Artificial Sequence
  Synthetic
SGDQLGYKYAS

SEQ ID NO: 545 - protein, 7 aa, Artificial Sequence
  Synthetic
QDSRRPS

SEQ ID NO: 546 - protein, 9 aa, Artificial Sequence
  Synthetic
QAWDSTTVV

SEQ ID NO: 547-549 - skipped (3 entries)

SEQ ID NO: 550 - protein, 7 aa, Artificial Sequence
  Synthetic
SGVYYWS

SEQ ID NO: 551 - protein, 16 aa, Artificial Sequence
  Synthetic
YIYYSGTTYYNPSLKS

SEQ ID NO: 552 - protein, 12 aa, Artificial Sequence
  Synthetic
GVTTVVPDAFDI

SEQ ID NO: 553 - protein, 11 aa, Artificial Sequence
  Synthetic
  MISC_FEATURE (1)..(1): Xaa is R or Q
  MISC_FEATURE (6)..(6): Xaa is V or I
  MISC_FEATURE (7)..(7): Xaa is N or S
  MISC_FEATURE (8)..(8): Xaa is S, H, I, V or A
XASQSXXXNLA

SEQ ID NO: 554 - protein, 7 aa, Artificial Sequence
  Synthetic
  MISC_FEATURE (3)..(3): Xaa is S or Y
  MISC_FEATURE (4)..(4): Xaa is T or I
GAXXRAT

SEQ ID NO: 555 - protein, 10 aa, Artificial Sequence
  Synthetic
  MISC_FEATURE (2)..(2): Xaa is Q, H, or E
  MISC_FEATURE (3)..(3): Xaa is F or Y
  MISC_FEATURE (4)..(4): Xaa is K, Y, or I
  MISC_FEATURE (5)..(5): Xaa is N, T, L, I, or M
  MISC_FEATURE (6)..(6): Xaa is W, F, H or Y
  MISC_FEATURE (7)..(7): Xaa is absent or P
  MISC_FEATURE (9)..(9): Xaa isW, N, Y, H or L
QXXXXXXPXT

SEQ ID NO: 556 - protein, 5 aa, Artificial Sequence
  Synthetic
  MISC_FEATURE (1)..(1): Xaa is A, R, T or S
  MISC_FEATURE (2)..(2): Xaa is Y or N
  MISC_FEATURE (3)..(3): Xaa is A or W
  MISC_FEATURE (5)..(5): Xaa is S or N
XXXMX

SEQ ID NO: 557 - protein, 12 aa, Artificial Sequence
  Synthetic
  MISC_FEATURE (1)..(1): Xaa is V, E, A, or G
  MISC_FEATURE (2)..(2): Xaa is A, F, Y or G
  MISC_FEATURE (3)..(3): Xaa is G, S, Y, or W
  MISC_FEATURE (4)..(4): Xaa is S or R
  MISC_FEATURE (5)..(5): Xaa is absent or N
  MISC_FEATURE (6)..(6): Xaa is F, S, Y, or Absent
  MISC_FEATURE (7)..(7): Xaa is L or F or absent
  MISC_FEATURE (9)..(9): Xaa is D or E
  MISC_FEATURE (12)..(12): Xaa is Y, H, or S
XXXXXXXFXYYX

SEQ ID NO: 558 - protein, 11 aa, Artificial Sequence
  Synthetic
  MISC_FEATURE (4)..(4): Xaa is R or Q
  MISC_FEATURE (7)..(7): Xaa is R, S, N, or F
  MISC_FEATURE (8)..(8): Xaa is K or N
  MISC_FEATURE (9)..(9): Xaa is H, Y, or D
QASXDIXXXLN

SEQ ID NO: 559 - protein, 17 aa, Artificial Sequence
  Synthetic
  MISC_FEATURE (1)..(1): Xaa is T, E, or S
  MISC_FEATURE (2)..(2): Xaa is absent or M, V or I
  MISC_FEATURE (3)..(3): Xaa is S, R, or  K
  MISC_FEATURE (4)..(4): Xaa is G or Q
  MISC_FEATURE (5)..(5): Xaa is S, D or H
  MISC_FEATURE (6)..(6): Xaa is G, S, L, or A
  MISC_FEATURE (7)..(7): Xaa is S, G, or R
  MISC_FEATURE (8)..(8): Xaa is T, S, P, or E
  MISC_FEATURE (9)..(9): Xaa is T or I
  MISC_FEATURE (12)..(12): Xaa is A or V
  MISC_FEATURE (13)..(13): Xaa is D or E
  MISC_FEATURE (14)..(14): Xaa is S or A
XXXXXXXXXYYXXXVKG

SEQ ID NO: 560 - protein, 7 aa, Artificial Sequence
  Synthetic
  MISC_FEATURE (1)..(1): Xaa is D, G, or H
  MISC_FEATURE (2)..(2): Xaa is A, V or T
  MISC_FEATURE (3)..(3): Xaa is S, A, or Y
  MISC_FEATURE (4)..(4): Xaa is T or N
XXXXLET

SEQ ID NO: 561 - protein, 9 aa, Artificial Sequence
  Synthetic
  MISC_FEATURE (2)..(2): Xaa is Q or H
  MISC_FEATURE (4)..(4): Xaa is D, A, or G
  MISC_FEATURE (5)..(5): Xaa is N or K
  MISC_FEATURE (6)..(6): Xaa is L or I
  MISC_FEATURE (8)..(8): Xaa is I or L
QXYXXXPXT

SEQ ID NO: 562 - skipped

SEQ ID NO: 563 - protein, 5 aa, Artificial Sequence
  Synthetic
  MISC_FEATURE (1)..(1): Xaa is R or S
XYDIN

SEQ ID NO: 564 - protein, 17 aa, Artificial Sequence
  Synthetic
  MISC_FEATURE (1)..(1): Xaa is W or R
  MISC_FEATURE (2)..(2): Xaa is M or L
  MISC_FEATURE (5)..(5): Xaa is N, Q, or K
  MISC_FEATURE (6)..(6): Xaa is S, A, or R
  MISC_FEATURE (8)..(8): Xaa is N or Q
  MISC_FEATURE (9)..(9): Xaa is S, A, or T
  MISC_FEATURE (11)..(11): Xaa is S, Q, or Y
  MISC_FEATURE (12)..(12): Xaa is V or T
  MISC_FEATURE (13)..(13): Xaa is Q or K
  MISC_FEATURE (14)..(14): Xaa is K or N
  MISC_FEATURE (16)..(16): Xaa is R or Q
  MISC_FEATURE (17)..(17): Xaa is G or I
XXNPXXGXXGXXXXFXX

SEQ ID NO: 565 - protein, 15 aa, Artificial Sequence
  Synthetic
  MISC_FEATURE (1)..(1): Xaa is G, L or R
  MISC_FEATURE (2)..(2): Xaa is G, I or R
  MISC_FEATURE (3)..(3): Xaa is Y, R, I, G, or A
  MISC_FEATURE (4)..(4): Xaa is T, S, Y, or V
  MISC_FEATURE (5)..(5): Xaa is S or Y
  MISC_FEATURE (6)..(6): Xaa is S, A, I, or R
  MISC_FEATURE (7)..(7): Xaa is W, A, or S
  MISC_FEATURE (8)..(8): Xaa is absent or S
  MISC_FEATURE (9)..(9): Xaa is absent or F, W, or Y
  MISC_FEATURE (10)..(10): Xaa is absent or R, S, H, K or E
  MISC_FEATURE (11)..(11): Xaa is W, H, Y, or F
  MISC_FEATURE (12)..(12): Xaa is Y, V, A, or S
  MISC_FEATURE (14)..(14): Xaa is D or Q
  MISC_FEATURE (15)..(15): Xaa is L, Y, I, or H
XXXXXXXXXXXXFXX

SEQ ID NO: 566 - protein, 11 aa, Artificial Sequence
  Synthetic
RASQSVNSNLA

SEQ ID NO: 567 - protein, 11 aa, Artificial Sequence
  Synthetic
QASQDIRKHLN

SEQ ID NO: 568 - protein, 11 aa, Artificial Sequence
  Synthetic
RASQDISSNLN

SEQ ID NO: 569 - protein, 9 aa, Artificial Sequence
  Synthetic
QASQDIHLN

SEQ ID NO: 570 - protein, 11 aa, Artificial Sequence
  Synthetic
RASQGIRKWLA

SEQ ID NO: 571 - protein, 11 aa, Artificial Sequence
  Synthetic
RASQSVNSNLA

SEQ ID NO: 572 - protein, 10 aa, Artificial Sequence
  Synthetic
SGDKLGERVS

SEQ ID NO: 573 - protein, 7 aa, Artificial Sequence
  Synthetic
GASTRAT

SEQ ID NO: 574 - protein, 7 aa, Artificial Sequence
  Synthetic
DASNLET

SEQ ID NO: 575 - protein, 7 aa, Artificial Sequence
  Synthetic
AASRLQS

SEQ ID NO: 576 - protein, 9 aa, Artificial Sequence
  Synthetic
QQFKNWPPT

SEQ ID NO: 577 - protein, 9 aa, Artificial Sequence
  Synthetic
QHYDNLPIT

SEQ ID NO: 578 - protein, 9 aa, Artificial Sequence
  Synthetic
LQAHGFPWT

SEQ ID NO: 579 - protein, 9 aa, Artificial Sequence
  Synthetic
QQYDNLPLT

SEQ ID NO: 580 - protein, 7 aa, Artificial Sequence
  Synthetic
QFWPPWT

SEQ ID NO: 581 - protein, 5 aa, Artificial Sequence
  Synthetic
AYAMS

SEQ ID NO: 582 - protein, 5 aa, Artificial Sequence
  Synthetic
RYDIN

SEQ ID NO: 583 - protein, 5 aa, Artificial Sequence
  Synthetic
SYWMS

SEQ ID NO: 584 - protein, 16 aa, Artificial Sequence
  Synthetic
TSGSGSTTYYADSVKG

SEQ ID NO: 585 - protein, 16 aa, Artificial Sequence
  Synthetic
WMNPNSGNSSVQKFRG

SEQ ID NO: 586 - protein, 17 aa, Artificial Sequence
  Synthetic
NIKQDGSEEYYVDSVKG

SEQ ID NO: 587 - protein, 215 aa, Artificial Sequence
  Synthetic
EIVMTQSPATLSVSPGERATLSCRASQSINANLAWYQQKPGQAPRLLIYGAYTRATGIPDRFSGSGSGTEFTLTISSLQSEDFAVYYCQEFIMWPPWTFGQGTKVEIKRTVAAPSVFIFPPSDEQLKSGTASVVCLLNNFYPREAKVQWKVDNALQSGNSQESVTEQDSKDSTYSLSSTLTLSKADYEKHKVYACEVTHQGLSSPVTKSFNRGEC

SEQ ID NO: 588 - DNA, 714 bp, Artificial Sequence
  Synthetic
atggacatgagggtgcccgctcagctcctggggctcctgctgctgtggctgagaggtgcgcgctgtgaaatcgtgatgacgcagtctccagccaccctgtctgtgtctccaggggaaagagccaccctctcctgcagggccagtcagagtattaacgctaacttagcctggtaccagcagaaacctggccaggctcccaggctcctcatctatggtgcatataccagggccactggtatcccagacaggttcagtggcagtgggtctgggacagagttcactctcaccatcagcagcctgcagtctgaagattttgcagtttattactgtcaggagtttattatgtggcctccgtggacgttcggccaggggaccaaggtggaaatcaaacgaacggtggctgcaccatctgtcttcatcttcccgccatctgatgagcagttgaaatctggaactgcctctgttgtgtgcctgctgaataacttctatcccagagaggccaaagtacagtggaaggtggataacgccctccaatcgggtaactcccaggagagtgtcacagagcaggacagcaaggacagcacctacagcctcagcagcaccctgacgctgagcaaagcagactacgagaaacacaaagtctacgcctgcgaagtcacccatcagggcctgagctcgcccgtcacaaagagcttcaacaggggagagtgttag

SEQ ID NO: 589 - protein, 215 aa, Artificial Sequence
  Synthetic
EIVMTQSPATLSVSPGERATLSCRASQSININLAWYQQKPGQAPRLLIYGAYTRATGIPDRFSGSGSGTEFTLTISSLQSEDFAVYYCQEFIMWPPWTFGQGTKVEIKRTVAAPSVFIFPPSDEQLKSGTASVVCLLNNFYPREAKVQWKVDNALQSGNSQESVTEQDSKDSTYSLSSTLTLSKADYEKHKVYACEVTHQGLSSPVTKSFNRGEC

SEQ ID NO: 590 - DNA, 714 bp, Artificial Sequence
  Synthetic
atggacatgagggtgcccgctcagctcctggggctcctgctgctgtggctgagaggtgcgcgctgtgaaatcgtgatgacgcagtctccagccaccctgtctgtgtctccaggggaaagagccaccctctcctgcagggccagtcagagtattaacattaacttagcctggtaccagcagaaacctggccaggctcccaggctcctcatctatggtgcatataccagggccactggtatcccagacaggttcagtggcagtgggtctgggacagagttcactctcaccatcagcagcctgcagtctgaagattttgcagtttattactgtcaggagtttattatgtggcctccgtggacgttcggccaggggaccaaggtggaaatcaaacgaacggtggctgcaccatctgtcttcatcttcccgccatctgatgagcagttgaaatctggaactgcctctgttgtgtgcctgctgaataacttctatcccagagaggccaaagtacagtggaaggtggataacgccctccaatcgggtaactcccaggagagtgtcacagagcaggacagcaaggacagcacctacagcctcagcagcaccctgacgctgagcaaagcagactacgagaaacacaaagtctacgcctgcgaagtcacccatcagggcctgagctcgcccgtcacaaagagcttcaacaggggagagtgttag

SEQ ID NO: 591 - protein, 215 aa, Artificial Sequence
  Synthetic
EIVMTQSPATLSVSPGERATLSCRASQSINHNLAWYQQKPGQAPRLLIYGAYTRATGIPDRFSGSGSGTEFTLTISSLQSEDFAVYYCQEFIMWPPWTFGQGTKVEIKRTVAAPSVFIFPPSDEQLKSGTASVVCLLNNFYPREAKVQWKVDNALQSGNSQESVTEQDSKDSTYSLSSTLTLSKADYEKHKVYACEVTHQGLSSPVTKSFNRGEC

SEQ ID NO: 592 - DNA, 714 bp, Artificial Sequence
  Synthetic
atggacatgagggtgcccgctcagctcctggggctcctgctgctgtggctgagaggtgcgcgctgtgaaatcgtgatgacgcagtctccagccaccctgtctgtgtctccaggggaaagagccaccctctcctgcagggccagtcagagtattaaccataacttagcctggtaccagcagaaacctggccaggctcccaggctcctcatctatggtgcatataccagggccactggtatcccagacaggttcagtggcagtgggtctgggacagagttcactctcaccatcagcagcctgcagtctgaagattttgcagtttattactgtcaggagtttattatgtggcctccgtggacgttcggccaggggaccaaggtggaaatcaaacgaacggtggctgcaccatctgtcttcatcttcccgccatctgatgagcagttgaaatctggaactgcctctgttgtgtgcctgctgaataacttctatcccagagaggccaaagtacagtggaaggtggataacgccctccaatcgggtaactcccaggagagtgtcacagagcaggacagcaaggacagcacctacagcctcagcagcaccctgacgctgagcaaagcagactacgagaaacacaaagtctacgcctgcgaagtcacccatcagggcctgagctcgcccgtcacaaagagcttcaacaggggagagtgttag

SEQ ID NO: 593 - protein, 215 aa, Artificial Sequence
  Synthetic
EIVMTQSPATLSVSPGERATLSCRASQSINVNLAWYQQKPGQAPRLLIYGAYTRATGIPDRFSGSGSGTEFTLTISSLQSEDFAVYYCQEFIMWPPWTFGQGTKVEIKRTVAAPSVFIFPPSDEQLKSGTASVVCLLNNFYPREAKVQWKVDNALQSGNSQESVTEQDSKDSTYSLSSTLTLSKADYEKHKVYACEVTHQGLSSPVTKSFNRGEC

SEQ ID NO: 594 - DNA, 714 bp, Artificial Sequence
  Synthetic
atggacatgagggtgcccgctcagctcctggggctcctgctgctgtggctgagaggtgcgcgctgtgaaatcgtgatgacgcagtctccagccaccctgtctgtgtctccaggggaaagagccaccctctcctgcagggccagtcagagtattaacgttaacttagcctggtaccagcagaaacctggccaggctcccaggctcctcatctatggtgcatataccagggccactggtatcccagacaggttcagtggcagtgggtctgggacagagttcactctcaccatcagcagcctgcagtctgaagattttgcagtttattactgtcaggagtttattatgtggcctccgtggacgttcggccaggggaccaaggtggaaatcaaacgaacggtggctgcaccatctgtcttcatcttcccgccatctgatgagcagttgaaatctggaactgcctctgttgtgtgcctgctgaataacttctatcccagagaggccaaagtacagtggaaggtggataacgccctccaatcgggtaactcccaggagagtgtcacagagcaggacagcaaggacagcacctacagcctcagcagcaccctgacgctgagcaaagcagactacgagaaacacaaagtctacgcctgcgaagtcacccatcagggcctgagctcgcccgtcacaaagagcttcaacaggggagagtgttag

SEQ ID NO: 595 - protein, 215 aa, Artificial Sequence
  Synthetic
EIVMTQSPATLSVSPGERATLSCRASQSINSNLAWYQQKPGQAPRLLIYGAYTRATGIPDRFSGSGSGTEFTLTISSLQSEDFAVYYCQEFIIWPPWTFGQGTKVEIKRTVAAPSVFIFPPSDEQLKSGTASVVCLLNNFYPREAKVQWKVDNALQSGNSQESVTEQDSKDSTYSLSSTLTLSKADYEKHKVYACEVTHQGLSSPVTKSFNRGEC

SEQ ID NO: 596 - DNA, 714 bp, Artificial Sequence
  Synthetic
atggacatgagggtgcccgctcagctcctggggctcctgctgctgtggctgagaggtgcgcgctgtgaaatcgtgatgacgcagtctccagccaccctgtctgtgtctccaggggaaagagccaccctctcctgcagggccagtcagagtattaacagcaacttagcctggtaccagcagaaacctggccaggctcccaggctcctcatctatggtgcatataccagggccactggtatcccagacaggttcagtggcagtgggtctgggacagagttcactctcaccatcagcagcctgcagtctgaagattttgcagtttattactgtcaggagtttattatttggcctccgtggacgttcggccaggggaccaaggtggaaatcaaacgaacggtggctgcaccatctgtcttcatcttcccgccatctgatgagcagttgaaatctggaactgcctctgttgtgtgcctgctgaataacttctatcccagagaggccaaagtacagtggaaggtggataacgccctccaatcgggtaactcccaggagagtgtcacagagcaggacagcaaggacagcacctacagcctcagcagcaccctgacgctgagcaaagcagactacgagaaacacaaagtctacgcctgcgaagtcacccatcagggcctgagctcgcccgtcacaaagagcttcaacaggggagagtgttag

SEQ ID NO: 597 - protein, 215 aa, Artificial Sequence
  Synthetic
EIVMTQSPATLSVSPGERATLSCRASQSINSNLAWYQQKPGQAPRLLIYGAYTRATGIPDRFSGSGSGTEFTLTISSLQSEDFAVYYCQEFILWPPWTFGQGTKVEIKRTVAAPSVFIFPPSDEQLKSGTASVVCLLNNFYPREAKVQWKVDNALQSGNSQESVTEQDSKDSTYSLSSTLTLSKADYEKHKVYACEVTHQGLSSPVTKSFNRGEC

SEQ ID NO: 598 - DNA, 714 bp, Artificial Sequence
  Synthetic
atggacatgagggtgcccgctcagctcctggggctcctgctgctgtggctgagaggtgcgcgctgtgaaatcgtgatgacgcagtctccagccaccctgtctgtgtctccaggggaaagagccaccctctcctgcagggccagtcagagtattaacagcaacttagcctggtaccagcagaaacctggccaggctcccaggctcctcatctatggtgcatataccagggccactggtatcccagacaggttcagtggcagtgggtctgggacagagttcactctcaccatcagcagcctgcagtctgaagattttgcagtttattactgtcaggagtttattctttggcctccgtggacgttcggccaggggaccaaggtggaaatcaaacgaacggtggctgcaccatctgtcttcatcttcccgccatctgatgagcagttgaaatctggaactgcctctgttgtgtgcctgctgaataacttctatcccagagaggccaaagtacagtggaaggtggataacgccctccaatcgggtaactcccaggagagtgtcacagagcaggacagcaaggacagcacctacagcctcagcagcaccctgacgctgagcaaagcagactacgagaaacacaaagtctacgcctgcgaagtcacccatcagggcctgagctcgcccgtcacaaagagcttcaacaggggagagtgttag

SEQ ID NO: 599 - protein, 215 aa, Artificial Sequence
  Synthetic
EIVMTQSPATLSVSPGERATLSCRASQSINSNLAWYQQKPGQAPRLLIYGAYTRATGIPDRFSGSGSGTEFTLTISSLQSEDFAVYYCQEFIMFPPWTFGQGTKVEIKRTVAAPSVFIFPPSDEQLKSGTASVVCLLNNFYPREAKVQWKVDNALQSGNSQESVTEQDSKDSTYSLSSTLTLSKADYEKHKVYACEVTHQGLSSPVTKSFNRGEC

SEQ ID NO: 600 - DNA, 714 bp, Artificial Sequence
  Synthetic
atggacatgagggtgcccgctcagctcctggggctcctgctgctgtggctgagaggtgcgcgctgtgaaatcgtgatgacgcagtctccagccaccctgtctgtgtctccaggggaaagagccaccctctcctgcagggccagtcagagtattaacagcaacttagcctggtaccagcagaaacctggccaggctcccaggctcctcatctatggtgcatataccagggccactggtatcccagacaggttcagtggcagtgggtctgggacagagttcactctcaccatcagcagcctgcagtctgaagattttgcagtttattactgtcaggagtttattatgtttcctccgtggacgttcggccaggggaccaaggtggaaatcaaacgaacggtggctgcaccatctgtcttcatcttcccgccatctgatgagcagttgaaatctggaactgcctctgttgtgtgcctgctgaataacttctatcccagagaggccaaagtacagtggaaggtggataacgccctccaatcgggtaactcccaggagagtgtcacagagcaggacagcaaggacagcacctacagcctcagcagcaccctgacgctgagcaaagcagactacgagaaacacaaagtctacgcctgcgaagtcacccatcagggcctgagctcgcccgtcacaaagagcttcaacaggggagagtgttag

SEQ ID NO: 601 - protein, 215 aa, Artificial Sequence
  Synthetic
EIVMTQSPATLSVSPGERATLSCRASQSINSNLAWYQQKPGQAPRLLIYGAYTRATGIPDRFSGSGSGTEFTLTISSLQSEDFAVYYCQEFIMWPPYTFGQGTKVEIKRTVAAPSVFIFPPSDEQLKSGTASVVCLLNNFYPREAKVQWKVDNALQSGNSQESVTEQDSKDSTYSLSSTLTLSKADYEKHKVYACEVTHQGLSSPVTKSFNRGEC

SEQ ID NO: 602 - DNA, 714 bp, Artificial Sequence
  Synthetic
atggacatgagggtgcccgctcagctcctggggctcctgctgctgtggctgagaggtgcgcgctgtgaaatcgtgatgacgcagtctccagccaccctgtctgtgtctccaggggaaagagccaccctctcctgcagggccagtcagagtattaacagcaacttagcctggtaccagcagaaacctggccaggctcccaggctcctcatctatggtgcatataccagggccactggtatcccagacaggttcagtggcagtgggtctgggacagagttcactctcaccatcagcagcctgcagtctgaagattttgcagtttattactgtcaggagtttattatgtggcctccgtatacgttcggccaggggaccaaggtggaaatcaaacgaacggtggctgcaccatctgtcttcatcttcccgccatctgatgagcagttgaaatctggaactgcctctgttgtgtgcctgctgaataacttctatcccagagaggccaaagtacagtggaaggtggataacgccctccaatcgggtaactcccaggagagtgtcacagagcaggacagcaaggacagcacctacagcctcagcagcaccctgacgctgagcaaagcagactacgagaaacacaaagtctacgcctgcgaagtcacccatcagggcctgagctcgcccgtcacaaagagcttcaacaggggagagtgttag

SEQ ID NO: 603 - protein, 215 aa, Artificial Sequence
  Synthetic
EIVMTQSPATLSVSPGERATLSCRASQSINSNLAWYQQKPGQAPRLLIYGAYTRATGIPDRFSGSGSGTEFTLTISSLQSEDFAVYYCQEFIMWPPHTFGQGTKVEIKRTVAAPSVFIFPPSDEQLKSGTASVVCLLNNFYPREAKVQWKVDNALQSGNSQESVTEQDSKDSTYSLSSTLTLSKADYEKHKVYACEVTHQGLSSPVTKSFNRGEC

SEQ ID NO: 604 - DNA, 714 bp, Artificial Sequence
  Synthetic
atggacatgagggtgcccgctcagctcctggggctcctgctgctgtggctgagaggtgcgcgctgtgaaatcgtgatgacgcagtctccagccaccctgtctgtgtctccaggggaaagagccaccctctcctgcagggccagtcagagtattaacagcaacttagcctggtaccagcagaaacctggccaggctcccaggctcctcatctatggtgcatataccagggccactggtatcccagacaggttcagtggcagtgggtctgggacagagttcactctcaccatcagcagcctgcagtctgaagattttgcagtttattactgtcaggagtttattatgtggcctccgcatacgttcggccaggggaccaaggtggaaatcaaacgaacggtggctgcaccatctgtcttcatcttcccgccatctgatgagcagttgaaatctggaactgcctctgttgtgtgcctgctgaataacttctatcccagagaggccaaagtacagtggaaggtggataacgccctccaatcgggtaactcccaggagagtgtcacagagcaggacagcaaggacagcacctacagcctcagcagcaccctgacgctgagcaaagcagactacgagaaacacaaagtctacgcctgcgaagtcacccatcagggcctgagctcgcccgtcacaaagagcttcaacaggggagagtgttag

SEQ ID NO: 605 - protein, 215 aa, Artificial Sequence
  Synthetic
EIVMTQSPATLSVSPGERATLSCRASQSINSNLAWYQQKPGQAPRLLIYGAYTRATGIPDRFSGSGSGTEFTLTISSLQSEDFAVYYCQEFIMWPPNTFGQGTKVEIKRTVAAPSVFIFPPSDEQLKSGTASVVCLLNNFYPREAKVQWKVDNALQSGNSQESVTEQDSKDSTYSLSSTLTLSKADYEKHKVYACEVTHQGLSSPVTKSFNRGEC

SEQ ID NO: 606 - DNA, 714 bp, Artificial Sequence
  Synthetic
atggacatgagggtgcccgctcagctcctggggctcctgctgctgtggctgagaggtgcgcgctgtgaaatcgtgatgacgcagtctccagccaccctgtctgtgtctccaggggaaagagccaccctctcctgcagggccagtcagagtattaacagcaacttagcctggtaccagcagaaacctggccaggctcccaggctcctcatctatggtgcatataccagggccactggtatcccagacaggttcagtggcagtgggtctgggacagagttcactctcaccatcagcagcctgcagtctgaagattttgcagtttattactgtcaggagtttattatgtggcctccgaatacgttcggccaggggaccaaggtggaaatcaaacgaacggtggctgcaccatctgtcttcatcttcccgccatctgatgagcagttgaaatctggaactgcctctgttgtgtgcctgctgaataacttctatcccagagaggccaaagtacagtggaaggtggataacgccctccaatcgggtaactcccaggagagtgtcacagagcaggacagcaaggacagcacctacagcctcagcagcaccctgacgctgagcaaagcagactacgagaaacacaaagtctacgcctgcgaagtcacccatcagggcctgagctcgcccgtcacaaagagcttcaacaggggagagtgttag

SEQ ID NO: 607 - protein, 215 aa, Artificial Sequence
  Synthetic
EIVMTQSPATLSVSPGERATLSCRASQSINSNLAWYQQKPGQAPRLLIYGAYTRATGIPDRFSGSGSGTEFTLTISSLQSEDFAVYYCQEFIMWPPWTFGQGTKVEIKRTVAAPSVFIFPPSDEQLKSGTASVVCLLNNFYPREAKVQWKVDNALQSGNSQESVTEQDSKDSTYSLSSTLTLSKADYEKHKVYACEVTHQGLSSPVTKSFNRGEC

SEQ ID NO: 608 - DNA, 714 bp, Artificial Sequence
  Synthetic
atggacatgagggtgcccgctcagctcctggggctcctgctgctgtggctgagaggtgcgcgctgtgaaatcgtgatgacgcagtctccagccaccctgtctgtgtctccaggggaaagagccaccctctcctgcagggccagtcagagtattaacagcaacttagcctggtaccagcagaaacctggccaggctcccaggctcctcatctatggtgcatataccagggccactggtatcccagacaggttcagtggcagtgggtctgggacagagttcactctcaccatcagcagcctgcagtctgaagattttgcagtttattactgtcaggagtttattatgtggcctccgtggacgttcggccaggggaccaaggtggaaatcaaacgaacggtggctgcaccatctgtcttcatcttcccgccatctgatgagcagttgaaatctggaactgcctctgttgtgtgcctgctgaataacttctatcccagagaggccaaagtacagtggaaggtggataacgccctccaatcgggtaactcccaggagagtgtcacagagcaggacagcaaggacagcacctacagcctcagcagcaccctgacgctgagcaaagcagactacgagaaacacaaagtctacgcctgcgaagtcacccatcagggcctgagctcgcccgtcacaaagagcttcaacaggggagagtgttag

SEQ ID NO: 609 - protein, 215 aa, Artificial Sequence
  Synthetic
EIVMTQSPATLSVSPGERATLSCRASQSINANLAWYQQKPGQAPRLLIYGAYTRATGIPDRFSGSGSGTEFTLTISSLQSEDFAVYYCQEFILWPPWTFGQGTKVEIKRTVAAPSVFIFPPSDEQLKSGTASVVCLLNNFYPREAKVQWKVDNALQSGNSQESVTEQDSKDSTYSLSSTLTLSKADYEKHKVYACEVTHQGLSSPVTKSFNRGEC

SEQ ID NO: 610 - DNA, 714 bp, Artificial Sequence
  Synthetic
atggacatgagggtgcccgctcagctcctggggctcctgctgctgtggctgagaggtgcgcgctgtgaaatcgtgatgacgcagtctccagccaccctgtctgtgtctccaggggaaagagccaccctctcctgcagggccagtcagagtattaacgctaacttagcctggtaccagcagaaacctggccaggctcccaggctcctcatctatggtgcatataccagggccactggtatcccagacaggttcagtggcagtgggtctgggacagagttcactctcaccatcagcagcctgcagtctgaagattttgcagtttattactgtcaggagtttattctttggcctccgtggacgttcggccaggggaccaaggtggaaatcaaacgaacggtggctgcaccatctgtcttcatcttcccgccatctgatgagcagttgaaatctggaactgcctctgttgtgtgcctgctgaataacttctatcccagagaggccaaagtacagtggaaggtggataacgccctccaatcgggtaactcccaggagagtgtcacagagcaggacagcaaggacagcacctacagcctcagcagcaccctgacgctgagcaaagcagactacgagaaacacaaagtctacgcctgcgaagtcacccatcagggcctgagctcgcccgtcacaaagagcttcaacaggggagagtgttag

SEQ ID NO: 611 - protein, 215 aa, Artificial Sequence
  Synthetic
EIVMTQSPATLSVSPGERATLSCRASQSINANLAWYQQKPGQAPRLLIYGAYTRATGIPDRFSGSGSGTEFTLTISSLQSEDFAVYYCQEFILWPPHTFGQGTKVEIKRTVAAPSVFIFPPSDEQLKSGTASVVCLLNNFYPREAKVQWKVDNALQSGNSQESVTEQDSKDSTYSLSSTLTLSKADYEKHKVYACEVTHQGLSSPVTKSFNRGEC

SEQ ID NO: 612 - DNA, 714 bp, Artificial Sequence
  Synthetic
atggacatgagggtgcccgctcagctcctggggctcctgctgctgtggctgagaggtgcgcgctgtgaaatcgtgatgacgcagtctccagccaccctgtctgtgtctccaggggaaagagccaccctctcctgcagggccagtcagagtattaacgctaacttagcctggtaccagcagaaacctggccaggctcccaggctcctcatctatggtgcatataccagggccactggtatcccagacaggttcagtggcagtgggtctgggacagagttcactctcaccatcagcagcctgcagtctgaagattttgcagtttattactgtcaggagtttattctttggcctccgcatacgttcggccaggggaccaaggtggaaatcaaacgaacggtggctgcaccatctgtcttcatcttcccgccatctgatgagcagttgaaatctggaactgcctctgttgtgtgcctgctgaataacttctatcccagagaggccaaagtacagtggaaggtggataacgccctccaatcgggtaactcccaggagagtgtcacagagcaggacagcaaggacagcacctacagcctcagcagcaccctgacgctgagcaaagcagactacgagaaacacaaagtctacgcctgcgaagtcacccatcagggcctgagctcgcccgtcacaaagagcttcaacaggggagagtgttag

SEQ ID NO: 613 - protein, 215 aa, Artificial Sequence
  Synthetic
EIVMTQSPATLSVSPGERATLSCRASQSINANLAWYQQKPGQAPRLLIYGAYTRATGIPDRFSGSGSGTEFTLTISSLQSEDFAVYYCQEFILWPPNTFGQGTKVEIKRTVAAPSVFIFPPSDEQLKSGTASVVCLLNNFYPREAKVQWKVDNALQSGNSQESVTEQDSKDSTYSLSSTLTLSKADYEKHKVYACEVTHQGLSSPVTKSFNRGEC

SEQ ID NO: 614 - DNA, 714 bp, Artificial Sequence
  Synthetic
atggacatgagggtgcccgctcagctcctggggctcctgctgctgtggctgagaggtgcgcgctgtgaaatcgtgatgacgcagtctccagccaccctgtctgtgtctccaggggaaagagccaccctctcctgcagggccagtcagagtattaacgctaacttagcctggtaccagcagaaacctggccaggctcccaggctcctcatctatggtgcatataccagggccactggtatcccagacaggttcagtggcagtgggtctgggacagagttcactctcaccatcagcagcctgcagtctgaagattttgcagtttattactgtcaggagtttattctttggcctccgaatacgttcggccaggggaccaaggtggaaatcaaacgaacggtggctgcaccatctgtcttcatcttcccgccatctgatgagcagttgaaatctggaactgcctctgttgtgtgcctgctgaataacttctatcccagagaggccaaagtacagtggaaggtggataacgccctccaatcgggtaactcccaggagagtgtcacagagcaggacagcaaggacagcacctacagcctcagcagcaccctgacgctgagcaaagcagactacgagaaacacaaagtctacgcctgcgaagtcacccatcagggcctgagctcgcccgtcacaaagagcttcaacaggggagagtgttag

SEQ ID NO: 615 - protein, 215 aa, Artificial Sequence
  Synthetic
EIVMTQSPATLSVSPGERATLSCRASQSINANLAWYQQKPGQAPRLLIYGAYTRATGIPDRFSGSGSGTEFTLTISSLQSEDFAVYYCQEFILFPPWTFGQGTKVEIKRTVAAPSVFIFPPSDEQLKSGTASVVCLLNNFYPREAKVQWKVDNALQSGNSQESVTEQDSKDSTYSLSSTLTLSKADYEKHKVYACEVTHQGLSSPVTKSFNRGEC

SEQ ID NO: 616 - DNA, 714 bp, Artificial Sequence
  Synthetic
atggacatgagggtgcccgctcagctcctggggctcctgctgctgtggctgagaggtgcgcgctgtgaaatcgtgatgacgcagtctccagccaccctgtctgtgtctccaggggaaagagccaccctctcctgcagggccagtcagagtattaacgctaacttagcctggtaccagcagaaacctggccaggctcccaggctcctcatctatggtgcatataccagggccactggtatcccagacaggttcagtggcagtgggtctgggacagagttcactctcaccatcagcagcctgcagtctgaagattttgcagtttattactgtcaggagtttattctttttcctccgtggacgttcggccaggggaccaaggtggaaatcaaacgaacggtggctgcaccatctgtcttcatcttcccgccatctgatgagcagttgaaatctggaactgcctctgttgtgtgcctgctgaataacttctatcccagagaggccaaagtacagtggaaggtggataacgccctccaatcgggtaactcccaggagagtgtcacagagcaggacagcaaggacagcacctacagcctcagcagcaccctgacgctgagcaaagcagactacgagaaacacaaagtctacgcctgcgaagtcacccatcagggcctgagctcgcccgtcacaaagagcttcaacaggggagagtgttag

SEQ ID NO: 617 - protein, 215 aa, Artificial Sequence
  Synthetic
EIVMTQSPATLSVSPGERATLSCRASQSINANLAWYQQKPGQAPRLLIYGAYTRATGIPDRFSGSGSGTEFTLTISSLQSEDFAVYYCQEFILFPPNTFGQGTKVEIKRTVAAPSVFIFPPSDEQLKSGTASVVCLLNNFYPREAKVQWKVDNALQSGNSQESVTEQDSKDSTYSLSSTLTLSKADYEKHKVYACEVTHQGLSSPVTKSFNRGEC

SEQ ID NO: 618 - DNA, 714 bp, Artificial Sequence
  Synthetic
atggacatgagggtgcccgctcagctcctggggctcctgctgctgtggctgagaggtgcgcgctgtgaaatcgtgatgacgcagtctccagccaccctgtctgtgtctccaggggaaagagccaccctctcctgcagggccagtcagagtattaacgctaacttagcctggtaccagcagaaacctggccaggctcccaggctcctcatctatggtgcatataccagggccactggtatcccagacaggttcagtggcagtgggtctgggacagagttcactctcaccatcagcagcctgcagtctgaagattttgcagtttattactgtcaggagtttattctttttcctccgaatacgttcggccaggggaccaaggtggaaatcaaacgaacggtggctgcaccatctgtcttcatcttcccgccatctgatgagcagttgaaatctggaactgcctctgttgtgtgcctgctgaataacttctatcccagagaggccaaagtacagtggaaggtggataacgccctccaatcgggtaactcccaggagagtgtcacagagcaggacagcaaggacagcacctacagcctcagcagcaccctgacgctgagcaaagcagactacgagaaacacaaagtctacgcctgcgaagtcacccatcagggcctgagctcgcccgtcacaaagagcttcaacaggggagagtgttag

SEQ ID NO: 619 - protein, 215 aa, Artificial Sequence
  Synthetic
EIVMTQSPATLSVSPGERATLSCRASQSINANLAWYQQKPGQAPRLLIYGAYTRATGIPDRFSGSGSGTEFTLTISSLQSEDFAVYYCQEFILFPPHTFGQGTKVEIKRTVAAPSVFIFPPSDEQLKSGTASVVCLLNNFYPREAKVQWKVDNALQSGNSQESVTEQDSKDSTYSLSSTLTLSKADYEKHKVYACEVTHQGLSSPVTKSFNRGEC

SEQ ID NO: 620 - DNA, 714 bp, Artificial Sequence
  Synthetic
atggacatgagggtgcccgctcagctcctggggctcctgctgctgtggctgagaggtgcgcgctgtgaaatcgtgatgacgcagtctccagccaccctgtctgtgtctccaggggaaagagccaccctctcctgcagggccagtcagagtattaacgctaacttagcctggtaccagcagaaacctggccaggctcccaggctcctcatctatggtgcatataccagggccactggtatcccagacaggttcagtggcagtgggtctgggacagagttcactctcaccatcagcagcctgcagtctgaagattttgcagtttattactgtcaggagtttattctttttcctccgcatacgttcggccaggggaccaaggtggaaatcaaacgaacggtggctgcaccatctgtcttcatcttcccgccatctgatgagcagttgaaatctggaactgcctctgttgtgtgcctgctgaataacttctatcccagagaggccaaagtacagtggaaggtggataacgccctccaatcgggtaactcccaggagagtgtcacagagcaggacagcaaggacagcacctacagcctcagcagcaccctgacgctgagcaaagcagactacgagaaacacaaagtctacgcctgcgaagtcacccatcagggcctgagctcgcccgtcacaaagagcttcaacaggggagagtgttag

SEQ ID NO: 621 - protein, 215 aa, Artificial Sequence
  Synthetic
EIVMTQSPATLSVSPGERATLSCRASQSINHNLAWYQQKPGQAPRLLIYGAYTRATGIPDRFSGSGSGTEFTLTISSLQSEDFAVYYCQEFILWPPWTFGQGTKVEIKRTVAAPSVFIFPPSDEQLKSGTASVVCLLNNFYPREAKVQWKVDNALQSGNSQESVTEQDSKDSTYSLSSTLTLSKADYEKHKVYACEVTHQGLSSPVTKSFNRGEC

SEQ ID NO: 622 - DNA, 714 bp, Artificial Sequence
  Synthetic
atggacatgagggtgcccgctcagctcctggggctcctgctgctgtggctgagaggtgcgcgctgtgaaatcgtgatgacgcagtctccagccaccctgtctgtgtctccaggggaaagagccaccctctcctgcagggccagtcagagtattaaccataacttagcctggtaccagcagaaacctggccaggctcccaggctcctcatctatggtgcatataccagggccactggtatcccagacaggttcagtggcagtgggtctgggacagagttcactctcaccatcagcagcctgcagtctgaagattttgcagtttattactgtcaggagtttattctttggcctccgtggacgttcggccaggggaccaaggtggaaatcaaacgaacggtggctgcaccatctgtcttcatcttcccgccatctgatgagcagttgaaatctggaactgcctctgttgtgtgcctgctgaataacttctatcccagagaggccaaagtacagtggaaggtggataacgccctccaatcgggtaactcccaggagagtgtcacagagcaggacagcaaggacagcacctacagcctcagcagcaccctgacgctgagcaaagcagactacgagaaacacaaagtctacgcctgcgaagtcacccatcagggcctgagctcgcccgtcacaaagagcttcaacaggggagagtgttag

SEQ ID NO: 623 - protein, 215 aa, Artificial Sequence
  Synthetic
EIVMTQSPATLSVSPGERATLSCRASQSINHNLAWYQQKPGQAPRLLIYGAYTRATGIPDRFSGSGSGTEFTLTISSLQSEDFAVYYCQEFILWPPNTFGQGTKVEIKRTVAAPSVFIFPPSDEQLKSGTASVVCLLNNFYPREAKVQWKVDNALQSGNSQESVTEQDSKDSTYSLSSTLTLSKADYEKHKVYACEVTHQGLSSPVTKSFNRGEC

SEQ ID NO: 624 - DNA, 714 bp, Artificial Sequence
  Synthetic
atggacatgagggtgcccgctcagctcctggggctcctgctgctgtggctgagaggtgcgcgctgtgaaatcgtgatgacgcagtctccagccaccctgtctgtgtctccaggggaaagagccaccctctcctgcagggccagtcagagtattaaccataacttagcctggtaccagcagaaacctggccaggctcccaggctcctcatctatggtgcatataccagggccactggtatcccagacaggttcagtggcagtgggtctgggacagagttcactctcaccatcagcagcctgcagtctgaagattttgcagtttattactgtcaggagtttattctttggcctccgaatacgttcggccaggggaccaaggtggaaatcaaacgaacggtggctgcaccatctgtcttcatcttcccgccatctgatgagcagttgaaatctggaactgcctctgttgtgtgcctgctgaataacttctatcccagagaggccaaagtacagtggaaggtggataacgccctccaatcgggtaactcccaggagagtgtcacagagcaggacagcaaggacagcacctacagcctcagcagcaccctgacgctgagcaaagcagactacgagaaacacaaagtctacgcctgcgaagtcacccatcagggcctgagctcgcccgtcacaaagagcttcaacaggggagagtgttag

SEQ ID NO: 625 - protein, 215 aa, Artificial Sequence
  Synthetic
EIVMTQSPATLSVSPGERATLSCRASQSINHNLAWYQQKPGQAPRLLIYGAYTRATGIPDRFSGSGSGTEFTLTISSLQSEDFAVYYCQEFILWPPHTFGQGTKVEIKRTVAAPSVFIFPPSDEQLKSGTASVVCLLNNFYPREAKVQWKVDNALQSGNSQESVTEQDSKDSTYSLSSTLTLSKADYEKHKVYACEVTHQGLSSPVTKSFNRGEC

SEQ ID NO: 626 - DNA, 714 bp, Artificial Sequence
  Synthetic
atggacatgagggtgcccgctcagctcctggggctcctgctgctgtggctgagaggtgcgcgctgtgaaatcgtgatgacgcagtctccagccaccctgtctgtgtctccaggggaaagagccaccctctcctgcagggccagtcagagtattaaccataacttagcctggtaccagcagaaacctggccaggctcccaggctcctcatctatggtgcatataccagggccactggtatcccagacaggttcagtggcagtgggtctgggacagagttcactctcaccatcagcagcctgcagtctgaagattttgcagtttattactgtcaggagtttattctttggcctccgcatacgttcggccaggggaccaaggtggaaatcaaacgaacggtggctgcaccatctgtcttcatcttcccgccatctgatgagcagttgaaatctggaactgcctctgttgtgtgcctgctgaataacttctatcccagagaggccaaagtacagtggaaggtggataacgccctccaatcgggtaactcccaggagagtgtcacagagcaggacagcaaggacagcacctacagcctcagcagcaccctgacgctgagcaaagcagactacgagaaacacaaagtctacgcctgcgaagtcacccatcagggcctgagctcgcccgtcacaaagagcttcaacaggggagagtgttag

SEQ ID NO: 627 - protein, 215 aa, Artificial Sequence
  Synthetic
EIVMTQSPATLSVSPGERATLSCRASQSINHNLAWYQQKPGQAPRLLIYGAYTRATGIPDRFSGSGSGTEFTLTISSLQSEDFAVYYCQEFILFPPWTFGQGTKVEIKRTVAAPSVFIFPPSDEQLKSGTASVVCLLNNFYPREAKVQWKVDNALQSGNSQESVTEQDSKDSTYSLSSTLTLSKADYEKHKVYACEVTHQGLSSPVTKSFNRGEC

SEQ ID NO: 628 - DNA, 714 bp, Artificial Sequence
  Synthetic
atggacatgagggtgcccgctcagctcctggggctcctgctgctgtggctgagaggtgcgcgctgtgaaatcgtgatgacgcagtctccagccaccctgtctgtgtctccaggggaaagagccaccctctcctgcagggccagtcagagtattaaccataacttagcctggtaccagcagaaacctggccaggctcccaggctcctcatctatggtgcatataccagggccactggtatcccagacaggttcagtggcagtgggtctgggacagagttcactctcaccatcagcagcctgcagtctgaagattttgcagtttattactgtcaggagtttattctttttcctccgtggacgttcggccaggggaccaaggtggaaatcaaacgaacggtggctgcaccatctgtcttcatcttcccgccatctgatgagcagttgaaatctggaactgcctctgttgtgtgcctgctgaataacttctatcccagagaggccaaagtacagtggaaggtggataacgccctccaatcgggtaactcccaggagagtgtcacagagcaggacagcaaggacagcacctacagcctcagcagcaccctgacgctgagcaaagcagactacgagaaacacaaagtctacgcctgcgaagtcacccatcagggcctgagctcgcccgtcacaaagagcttcaacaggggagagtgttag

SEQ ID NO: 629 - protein, 215 aa, Artificial Sequence
  Synthetic
EIVMTQSPATLSVSPGERATLSCRASQSINHNLAWYQQKPGQAPRLLIYGAYTRATGIPDRFSGSGSGTEFTLTISSLQSEDFAVYYCQEFILFPPNTFGQGTKVEIKRTVAAPSVFIFPPSDEQLKSGTASVVCLLNNFYPREAKVQWKVDNALQSGNSQESVTEQDSKDSTYSLSSTLTLSKADYEKHKVYACEVTHQGLSSPVTKSFNRGEC

SEQ ID NO: 630 - DNA, 714 bp, Artificial Sequence
  Synthetic
atggacatgagggtgcccgctcagctcctggggctcctgctgctgtggctgagaggtgcgcgctgtgaaatcgtgatgacgcagtctccagccaccctgtctgtgtctccaggggaaagagccaccctctcctgcagggccagtcagagtattaaccataacttagcctggtaccagcagaaacctggccaggctcccaggctcctcatctatggtgcatataccagggccactggtatcccagacaggttcagtggcagtgggtctgggacagagttcactctcaccatcagcagcctgcagtctgaagattttgcagtttattactgtcaggagtttattctttttcctccgaatacgttcggccaggggaccaaggtggaaatcaaacgaacggtggctgcaccatctgtcttcatcttcccgccatctgatgagcagttgaaatctggaactgcctctgttgtgtgcctgctgaataacttctatcccagagaggccaaagtacagtggaaggtggataacgccctccaatcgggtaactcccaggagagtgtcacagagcaggacagcaaggacagcacctacagcctcagcagcaccctgacgctgagcaaagcagactacgagaaacacaaagtctacgcctgcgaagtcacccatcagggcctgagctcgcccgtcacaaagagcttcaacaggggagagtgttag

SEQ ID NO: 631 - protein, 215 aa, Artificial Sequence
  Synthetic
EIVMTQSPATLSVSPGERATLSCRASQSINHNLAWYQQKPGQAPRLLIYGAYTRATGIPDRFSGSGSGTEFTLTISSLQSEDFAVYYCQEFILFPPHTFGQGTKVEIKRTVAAPSVFIFPPSDEQLKSGTASVVCLLNNFYPREAKVQWKVDNALQSGNSQESVTEQDSKDSTYSLSSTLTLSKADYEKHKVYACEVTHQGLSSPVTKSFNRGEC

SEQ ID NO: 632 - DNA, 714 bp, Artificial Sequence
  Synthetic
atggacatgagggtgcccgctcagctcctggggctcctgctgctgtggctgagaggtgcgcgctgtgaaatcgtgatgacgcagtctccagccaccctgtctgtgtctccaggggaaagagccaccctctcctgcagggccagtcagagtattaaccataacttagcctggtaccagcagaaacctggccaggctcccaggctcctcatctatggtgcatataccagggccactggtatcccagacaggttcagtggcagtgggtctgggacagagttcactctcaccatcagcagcctgcagtctgaagattttgcagtttattactgtcaggagtttattctttttcctccgcatacgttcggccaggggaccaaggtggaaatcaaacgaacggtggctgcaccatctgtcttcatcttcccgccatctgatgagcagttgaaatctggaactgcctctgttgtgtgcctgctgaataacttctatcccagagaggccaaagtacagtggaaggtggataacgccctccaatcgggtaactcccaggagagtgtcacagagcaggacagcaaggacagcacctacagcctcagcagcaccctgacgctgagcaaagcagactacgagaaacacaaagtctacgcctgcgaagtcacccatcagggcctgagctcgcccgtcacaaagagcttcaacaggggagagtgttag

SEQ ID NO: 633 - protein, 215 aa, Artificial Sequence
  Synthetic
EIVMTQSPATLSVSPGERATLSCRASQSVNSNLAWYQQKPGQAPRLLIYGASTRATGIPARFSGSGSGTEFTLTISSLQSEDFAVYYCQQFYNWPPWTFGQGTKVEIKRTVAAPSVFIFPPSDEQLKSGTASVVCLLNNFYPREAKVQWKVDNALQSGNSQESVTEQDSKDSTYSLSSTLTLSKADYEKHKVYACEVTHQGLSSPVTKSFNRGEC

SEQ ID NO: 634 - DNA, 714 bp, Artificial Sequence
  Synthetic
atggacatgagggtgcccgctcagctcctggggctcctgctgctgtggctgagaggtgcgcgctgtgaaatcgtgatgacgcagtctccagccaccctgtctgtgtctccaggggaaagagccaccctctcctgcagggccagtcagagtgttaacagcaacttagcctggtaccagcagaaacctggccaagctcccaggctcctcatctatggtgcatccaccagggccactggtatcccagccaggttcagtggcagtgggtctgggacagagttcactctcaccatcagcagcctgcagtctgaagattttgcagtttattactgtcagcagttttataactggcctccgtggacgttcggccaggggaccaaggtggaaatcaaacgaacggtggctgcaccatctgtcttcatcttcccgccatctgatgagcagttgaaatctggaactgcctctgttgtgtgcctgctgaataacttctatcccagagaggccaaagtacagtggaaggtggataacgccctccaatcgggtaactcccaggagagtgtcacagagcaggacagcaaggacagcacctacagcctcagcagcaccctgacgctgagcaaagcagactacgagaaacacaaagtctacgcctgcgaagtcacccatcagggcctgagctcgcccgtcacaaagagcttcaacaggggagagtgttag

SEQ ID NO: 635 - protein, 215 aa, Artificial Sequence
  Synthetic
EIVMTQSPATLSVSPGERATLSCRASQSVNANLAWYQQKPGQAPRLLIYGASTRATGIPARFSGSGSGTEFTLTISSLQSEDFAVYYCQQFYNWPPWTFGQGTKVEIKRTVAAPSVFIFPPSDEQLKSGTASVVCLLNNFYPREAKVQWKVDNALQSGNSQESVTEQDSKDSTYSLSSTLTLSKADYEKHKVYACEVTHQGLSSPVTKSFNRGEC

SEQ ID NO: 636 - DNA, 714 bp, Artificial Sequence
  Synthetic
atggacatgagggtgcccgctcagctcctggggctcctgctgctgtggctgagaggtgcgcgctgtgaaatcgtgatgacgcagtctccagccaccctgtctgtgtctccaggggaaagagccaccctctcctgcagggccagtcagagtgttaacgctaacttagcctggtaccagcagaaacctggccaagctcccaggctcctcatctatggtgcatccaccagggccactggtatcccagccaggttcagtggcagtgggtctgggacagagttcactctcaccatcagcagcctgcagtctgaagattttgcagtttattactgtcagcagttttataactggcctccgtggacgttcggccaggggaccaaggtggaaatcaaacgaacggtggctgcaccatctgtcttcatcttcccgccatctgatgagcagttgaaatctggaactgcctctgttgtgtgcctgctgaataacttctatcccagagaggccaaagtacagtggaaggtggataacgccctccaatcgggtaactcccaggagagtgtcacagagcaggacagcaaggacagcacctacagcctcagcagcaccctgacgctgagcaaagcagactacgagaaacacaaagtctacgcctgcgaagtcacccatcagggcctgagctcgcccgtcacaaagagcttcaacaggggagagtgttag

SEQ ID NO: 637 - protein, 215 aa, Artificial Sequence
  Synthetic
EIVMTQSPATLSVSPGERATLSCRASQSVNINLAWYQQKPGQAPRLLIYGASTRATGIPARFSGSGSGTEFTLTISSLQSEDFAVYYCQQFYNWPPWTFGQGTKVEIKRTVAAPSVFIFPPSDEQLKSGTASVVCLLNNFYPREAKVQWKVDNALQSGNSQESVTEQDSKDSTYSLSSTLTLSKADYEKHKVYACEVTHQGLSSPVTKSFNRGEC

SEQ ID NO: 638 - DNA, 714 bp, Artificial Sequence
  Synthetic
atggacatgagggtgcccgctcagctcctggggctcctgctgctgtggctgagaggtgcgcgctgtgaaatcgtgatgacgcagtctccagccaccctgtctgtgtctccaggggaaagagccaccctctcctgcagggccagtcagagtgttaacattaacttagcctggtaccagcagaaacctggccaagctcccaggctcctcatctatggtgcatccaccagggccactggtatcccagccaggttcagtggcagtgggtctgggacagagttcactctcaccatcagcagcctgcagtctgaagattttgcagtttattactgtcagcagttttataactggcctccgtggacgttcggccaggggaccaaggtggaaatcaaacgaacggtggctgcaccatctgtcttcatcttcccgccatctgatgagcagttgaaatctggaactgcctctgttgtgtgcctgctgaataacttctatcccagagaggccaaagtacagtggaaggtggataacgccctccaatcgggtaactcccaggagagtgtcacagagcaggacagcaaggacagcacctacagcctcagcagcaccctgacgctgagcaaagcagactacgagaaacacaaagtctacgcctgcgaagtcacccatcagggcctgagctcgcccgtcacaaagagcttcaacaggggagagtgttag

SEQ ID NO: 639 - protein, 215 aa, Artificial Sequence
  Synthetic
EIVMTQSPATLSVSPGERATLSCRASQSVNHNLAWYQQKPGQAPRLLIYGASTRATGIPARFSGSGSGTEFTLTISSLQSEDFAVYYCQQFYNWPPWTFGQGTKVEIKRTVAAPSVFIFPPSDEQLKSGTASVVCLLNNFYPREAKVQWKVDNALQSGNSQESVTEQDSKDSTYSLSSTLTLSKADYEKHKVYACEVTHQGLSSPVTKSFNRGEC

SEQ ID NO: 640 - DNA, 714 bp, Artificial Sequence
  Synthetic
atggacatgagggtgcccgctcagctcctggggctcctgctgctgtggctgagaggtgcgcgctgtgaaatcgtgatgacgcagtctccagccaccctgtctgtgtctccaggggaaagagccaccctctcctgcagggccagtcagagtgttaaccataacttagcctggtaccagcagaaacctggccaagctcccaggctcctcatctatggtgcatccaccagggccactggtatcccagccaggttcagtggcagtgggtctgggacagagttcactctcaccatcagcagcctgcagtctgaagattttgcagtttattactgtcagcagttttataactggcctccgtggacgttcggccaggggaccaaggtggaaatcaaacgaacggtggctgcaccatctgtcttcatcttcccgccatctgatgagcagttgaaatctggaactgcctctgttgtgtgcctgctgaataacttctatcccagagaggccaaagtacagtggaaggtggataacgccctccaatcgggtaactcccaggagagtgtcacagagcaggacagcaaggacagcacctacagcctcagcagcaccctgacgctgagcaaagcagactacgagaaacacaaagtctacgcctgcgaagtcacccatcagggcctgagctcgcccgtcacaaagagcttcaacaggggagagtgttag

SEQ ID NO: 641 - protein, 215 aa, Artificial Sequence
  Synthetic
EIVMTQSPATLSVSPGERATLSCRASQSVNVNLAWYQQKPGQAPRLLIYGASTRATGIPARFSGSGSGTEFTLTISSLQSEDFAVYYCQQFYNWPPWTFGQGTKVEIKRTVAAPSVFIFPPSDEQLKSGTASVVCLLNNFYPREAKVQWKVDNALQSGNSQESVTEQDSKDSTYSLSSTLTLSKADYEKHKVYACEVTHQGLSSPVTKSFNRGEC

SEQ ID NO: 642 - DNA, 714 bp, Artificial Sequence
  Synthetic
atggacatgagggtgcccgctcagctcctggggctcctgctgctgtggctgagaggtgcgcgctgtgaaatcgtgatgacgcagtctccagccaccctgtctgtgtctccaggggaaagagccaccctctcctgcagggccagtcagagtgttaacgttaacttagcctggtaccagcagaaacctggccaagctcccaggctcctcatctatggtgcatccaccagggccactggtatcccagccaggttcagtggcagtgggtctgggacagagttcactctcaccatcagcagcctgcagtctgaagattttgcagtttattactgtcagcagttttataactggcctccgtggacgttcggccaggggaccaaggtggaaatcaaacgaacggtggctgcaccatctgtcttcatcttcccgccatctgatgagcagttgaaatctggaactgcctctgttgtgtgcctgctgaataacttctatcccagagaggccaaagtacagtggaaggtggataacgccctccaatcgggtaactcccaggagagtgtcacagagcaggacagcaaggacagcacctacagcctcagcagcaccctgacgctgagcaaagcagactacgagaaacacaaagtctacgcctgcgaagtcacccatcagggcctgagctcgcccgtcacaaagagcttcaacaggggagagtgttag

SEQ ID NO: 643 - protein, 215 aa, Artificial Sequence
  Synthetic
EIVMTQSPATLSVSPGERATLSCRASQSVNSNLAWYQQKPGQAPRLLIYGASTRATGIPARFSGSGSGTEFTLTISSLQSEDFAVYYCQQFYNFPPWTFGQGTKVEIKRTVAAPSVFIFPPSDEQLKSGTASVVCLLNNFYPREAKVQWKVDNALQSGNSQESVTEQDSKDSTYSLSSTLTLSKADYEKHKVYACEVTHQGLSSPVTKSFNRGEC

SEQ ID NO: 644 - DNA, 714 bp, Artificial Sequence
  Synthetic
atggacatgagggtgcccgctcagctcctggggctcctgctgctgtggctgagaggtgcgcgctgtgaaatcgtgatgacgcagtctccagccaccctgtctgtgtctccaggggaaagagccaccctctcctgcagggccagtcagagtgttaacagcaacttagcctggtaccagcagaaacctggccaagctcccaggctcctcatctatggtgcatccaccagggccactggtatcccagccaggttcagtggcagtgggtctgggacagagttcactctcaccatcagcagcctgcagtctgaagattttgcagtttattactgtcagcagttttataactttcctccgtggacgttcggccaggggaccaaggtggaaatcaaacgaacggtggctgcaccatctgtcttcatcttcccgccatctgatgagcagttgaaatctggaactgcctctgttgtgtgcctgctgaataacttctatcccagagaggccaaagtacagtggaaggtggataacgccctccaatcgggtaactcccaggagagtgtcacagagcaggacagcaaggacagcacctacagcctcagcagcaccctgacgctgagcaaagcagactacgagaaacacaaagtctacgcctgcgaagtcacccatcagggcctgagctcgcccgtcacaaagagcttcaacaggggagagtgttag

SEQ ID NO: 645 - protein, 215 aa, Artificial Sequence
  Synthetic
EIVMTQSPATLSVSPGERATLSCRASQSVNSNLAWYQQKPGQAPRLLIYGASTRATGIPARFSGSGSGTEFTLTISSLQSEDFAVYYCQQFYNWPPYTFGQGTKVEIKRTVAAPSVFIFPPSDEQLKSGTASVVCLLNNFYPREAKVQWKVDNALQSGNSQESVTEQDSKDSTYSLSSTLTLSKADYEKHKVYACEVTHQGLSSPVTKSFNRGEC

SEQ ID NO: 646 - DNA, 714 bp, Artificial Sequence
  Synthetic
atggacatgagggtgcccgctcagctcctggggctcctgctgctgtggctgagaggtgcgcgctgtgaaatcgtgatgacgcagtctccagccaccctgtctgtgtctccaggggaaagagccaccctctcctgcagggccagtcagagtgttaacagcaacttagcctggtaccagcagaaacctggccaagctcccaggctcctcatctatggtgcatccaccagggccactggtatcccagccaggttcagtggcagtgggtctgggacagagttcactctcaccatcagcagcctgcagtctgaagattttgcagtttattactgtcagcagttttataactggcctccgtatacgttcggccaggggaccaaggtggaaatcaaacgaacggtggctgcaccatctgtcttcatcttcccgccatctgatgagcagttgaaatctggaactgcctctgttgtgtgcctgctgaataacttctatcccagagaggccaaagtacagtggaaggtggataacgccctccaatcgggtaactcccaggagagtgtcacagagcaggacagcaaggacagcacctacagcctcagcagcaccctgacgctgagcaaagcagactacgagaaacacaaagtctacgcctgcgaagtcacccatcagggcctgagctcgcccgtcacaaagagcttcaacaggggagagtgttag

SEQ ID NO: 647 - protein, 215 aa, Artificial Sequence
  Synthetic
EIVMTQSPATLSVSPGERATLSCRASQSVNSNLAWYQQKPGQAPRLLIYGASTRATGIPARFSGSGSGTEFTLTISSLQSEDFAVYYCQQFYNWPPHTFGQGTKVEIKRTVAAPSVFIFPPSDEQLKSGTASVVCLLNNFYPREAKVQWKVDNALQSGNSQESVTEQDSKDSTYSLSSTLTLSKADYEKHKVYACEVTHQGLSSPVTKSFNRGEC

SEQ ID NO: 648 - DNA, 714 bp, Artificial Sequence
  Synthetic
atggacatgagggtgcccgctcagctcctggggctcctgctgctgtggctgagaggtgcgcgctgtgaaatcgtgatgacgcagtctccagccaccctgtctgtgtctccaggggaaagagccaccctctcctgcagggccagtcagagtgttaacagcaacttagcctggtaccagcagaaacctggccaagctcccaggctcctcatctatggtgcatccaccagggccactggtatcccagccaggttcagtggcagtgggtctgggacagagttcactctcaccatcagcagcctgcagtctgaagattttgcagtttattactgtcagcagttttataactggcctccgcatacgttcggccaggggaccaaggtggaaatcaaacgaacggtggctgcaccatctgtcttcatcttcccgccatctgatgagcagttgaaatctggaactgcctctgttgtgtgcctgctgaataacttctatcccagagaggccaaagtacagtggaaggtggataacgccctccaatcgggtaactcccaggagagtgtcacagagcaggacagcaaggacagcacctacagcctcagcagcaccctgacgctgagcaaagcagactacgagaaacacaaagtctacgcctgcgaagtcacccatcagggcctgagctcgcccgtcacaaagagcttcaacaggggagagtgttag

SEQ ID NO: 649 - protein, 215 aa, Artificial Sequence
  Synthetic
EIVMTQSPATLSVSPGERATLSCRASQSVNSNLAWYQQKPGQAPRLLIYGASTRATGIPARFSGSGSGTEFTLTISSLQSEDFAVYYCQQFYNWPPNTFGQGTKVEIKRTVAAPSVFIFPPSDEQLKSGTASVVCLLNNFYPREAKVQWKVDNALQSGNSQESVTEQDSKDSTYSLSSTLTLSKADYEKHKVYACEVTHQGLSSPVTKSFNRGEC

SEQ ID NO: 650 - DNA, 714 bp, Artificial Sequence
  Synthetic
atggacatgagggtgcccgctcagctcctggggctcctgctgctgtggctgagaggtgcgcgctgtgaaatcgtgatgacgcagtctccagccaccctgtctgtgtctccaggggaaagagccaccctctcctgcagggccagtcagagtgttaacagcaacttagcctggtaccagcagaaacctggccaagctcccaggctcctcatctatggtgcatccaccagggccactggtatcccagccaggttcagtggcagtgggtctgggacagagttcactctcaccatcagcagcctgcagtctgaagattttgcagtttattactgtcagcagttttataactggcctccgaatacgttcggccaggggaccaaggtggaaatcaaacgaacggtggctgcaccatctgtcttcatcttcccgccatctgatgagcagttgaaatctggaactgcctctgttgtgtgcctgctgaataacttctatcccagagaggccaaagtacagtggaaggtggataacgccctccaatcgggtaactcccaggagagtgtcacagagcaggacagcaaggacagcacctacagcctcagcagcaccctgacgctgagcaaagcagactacgagaaacacaaagtctacgcctgcgaagtcacccatcagggcctgagctcgcccgtcacaaagagcttcaacaggggagagtgttag

SEQ ID NO: 651 - protein, 215 aa, Artificial Sequence; identical to SEQ ID NO: 633
  Synthetic

SEQ ID NO: 652 - DNA, 714 bp, Artificial Sequence; identical to SEQ ID NO: 634
  Synthetic

SEQ ID NO: 653 - protein, 215 aa, Artificial Sequence; identical to SEQ ID NO: 635
  Synthetic

SEQ ID NO: 654 - DNA, 714 bp, Artificial Sequence; identical to SEQ ID NO: 636
  Synthetic

SEQ ID NO: 655 - protein, 215 aa, Artificial Sequence
  Synthetic
EIVMTQSPATLSVSPGERATLSCRASQSVNANLAWYQQKPGQAPRLLIYGASTRATGIPARFSGSGSGTEFTLTISSLQSEDFAVYYCQQFYNFPPWTFGQGTKVEIKRTVAAPSVFIFPPSDEQLKSGTASVVCLLNNFYPREAKVQWKVDNALQSGNSQESVTEQDSKDSTYSLSSTLTLSKADYEKHKVYACEVTHQGLSSPVTKSFNRGEC

SEQ ID NO: 656 - DNA, 714 bp, Artificial Sequence
  Synthetic
atggacatgagggtgcccgctcagctcctggggctcctgctgctgtggctgagaggtgcgcgctgtgaaatcgtgatgacgcagtctccagccaccctgtctgtgtctccaggggaaagagccaccctctcctgcagggccagtcagagtgttaacgctaacttagcctggtaccagcagaaacctggccaagctcccaggctcctcatctatggtgcatccaccagggccactggtatcccagccaggttcagtggcagtgggtctgggacagagttcactctcaccatcagcagcctgcagtctgaagattttgcagtttattactgtcagcagttttataactttcctccgtggacgttcggccaggggaccaaggtggaaatcaaacgaacggtggctgcaccatctgtcttcatcttcccgccatctgatgagcagttgaaatctggaactgcctctgttgtgtgcctgctgaataacttctatcccagagaggccaaagtacagtggaaggtggataacgccctccaatcgggtaactcccaggagagtgtcacagagcaggacagcaaggacagcacctacagcctcagcagcaccctgacgctgagcaaagcagactacgagaaacacaaagtctacgcctgcgaagtcacccatcagggcctgagctcgcccgtcacaaagagcttcaacaggggagagtgttag

SEQ ID NO: 657 - protein, 215 aa, Artificial Sequence
  Synthetic
EIVMTQSPATLSVSPGERATLSCRASQSVNANLAWYQQKPGQAPRLLIYGASTRATGIPARFSGSGSGTEFTLTISSLQSEDFAVYYCQQFYNWPPYTFGQGTKVEIKRTVAAPSVFIFPPSDEQLKSGTASVVCLLNNFYPREAKVQWKVDNALQSGNSQESVTEQDSKDSTYSLSSTLTLSKADYEKHKVYACEVTHQGLSSPVTKSFNRGEC

SEQ ID NO: 658 - DNA, 714 bp, Artificial Sequence
  Synthetic
atggacatgagggtgcccgctcagctcctggggctcctgctgctgtggctgagaggtgcgcgctgtgaaatcgtgatgacgcagtctccagccaccctgtctgtgtctccaggggaaagagccaccctctcctgcagggccagtcagagtgttaacgctaacttagcctggtaccagcagaaacctggccaagctcccaggctcctcatctatggtgcatccaccagggccactggtatcccagccaggttcagtggcagtgggtctgggacagagttcactctcaccatcagcagcctgcagtctgaagattttgcagtttattactgtcagcagttttataactggcctccgtatacgttcggccaggggaccaaggtggaaatcaaacgaacggtggctgcaccatctgtcttcatcttcccgccatctgatgagcagttgaaatctggaactgcctctgttgtgtgcctgctgaataacttctatcccagagaggccaaagtacagtggaaggtggataacgccctccaatcgggtaactcccaggagagtgtcacagagcaggacagcaaggacagcacctacagcctcagcagcaccctgacgctgagcaaagcagactacgagaaacacaaagtctacgcctgcgaagtcacccatcagggcctgagctcgcccgtcacaaagagcttcaacaggggagagtgttag

SEQ ID NO: 659 - protein, 215 aa, Artificial Sequence
  Synthetic
EIVMTQSPATLSVSPGERATLSCRASQSVNANLAWYQQKPGQAPRLLIYGASTRATGIPARFSGSGSGTEFTLTISSLQSEDFAVYYCQQFYNWPPHTFGQGTKVEIKRTVAAPSVFIFPPSDEQLKSGTASVVCLLNNFYPREAKVQWKVDNALQSGNSQESVTEQDSKDSTYSLSSTLTLSKADYEKHKVYACEVTHQGLSSPVTKSFNRGEC

SEQ ID NO: 660 - DNA, 714 bp, Artificial Sequence
  Synthetic
atggacatgagggtgcccgctcagctcctggggctcctgctgctgtggctgagaggtgcgcgctgtgaaatcgtgatgacgcagtctccagccaccctgtctgtgtctccaggggaaagagccaccctctcctgcagggccagtcagagtgttaacgctaacttagcctggtaccagcagaaacctggccaagctcccaggctcctcatctatggtgcatccaccagggccactggtatcccagccaggttcagtggcagtgggtctgggacagagttcactctcaccatcagcagcctgcagtctgaagattttgcagtttattactgtcagcagttttataactggcctccgcatacgttcggccaggggaccaaggtggaaatcaaacgaacggtggctgcaccatctgtcttcatcttcccgccatctgatgagcagttgaaatctggaactgcctctgttgtgtgcctgctgaataacttctatcccagagaggccaaagtacagtggaaggtggataacgccctccaatcgggtaactcccaggagagtgtcacagagcaggacagcaaggacagcacctacagcctcagcagcaccctgacgctgagcaaagcagactacgagaaacacaaagtctacgcctgcgaagtcacccatcagggcctgagctcgcccgtcacaaagagcttcaacaggggagagtgttag

SEQ ID NO: 661 - protein, 215 aa, Artificial Sequence
  Synthetic
EIVMTQSPATLSVSPGERATLSCRASQSVNANLAWYQQKPGQAPRLLIYGASTRATGIPARFSGSGSGTEFTLTISSLQSEDFAVYYCQQFYNFPPYTFGQGTKVEIKRTVAAPSVFIFPPSDEQLKSGTASVVCLLNNFYPREAKVQWKVDNALQSGNSQESVTEQDSKDSTYSLSSTLTLSKADYEKHKVYACEVTHQGLSSPVTKSFNRGEC

SEQ ID NO: 662 - DNA, 714 bp, Artificial Sequence
  Synthetic
atggacatgagggtgcccgctcagctcctggggctcctgctgctgtggctgagaggtgcgcgctgtgaaatcgtgatgacgcagtctccagccaccctgtctgtgtctccaggggaaagagccaccctctcctgcagggccagtcagagtgttaacgctaacttagcctggtaccagcagaaacctggccaagctcccaggctcctcatctatggtgcatccaccagggccactggtatcccagccaggttcagtggcagtgggtctgggacagagttcactctcaccatcagcagcctgcagtctgaagattttgcagtttattactgtcagcagttttataactttcctccgtatacgttcggccaggggaccaaggtggaaatcaaacgaacggtggctgcaccatctgtcttcatcttcccgccatctgatgagcagttgaaatctggaactgcctctgttgtgtgcctgctgaataacttctatcccagagaggccaaagtacagtggaaggtggataacgccctccaatcgggtaactcccaggagagtgtcacagagcaggacagcaaggacagcacctacagcctcagcagcaccctgacgctgagcaaagcagactacgagaaacacaaagtctacgcctgcgaagtcacccatcagggcctgagctcgcccgtcacaaagagcttcaacaggggagagtgttag

SEQ ID NO: 663 - protein, 215 aa, Artificial Sequence
  Synthetic
EIVMTQSPATLSVSPGERATLSCRASQSVNANLAWYQQKPGQAPRLLIYGASTRATGIPARFSGSGSGTEFTLTISSLQSEDFAVYYCQQFYNFPPHTFGQGTKVEIKRTVAAPSVFIFPPSDEQLKSGTASVVCLLNNFYPREAKVQWKVDNALQSGNSQESVTEQDSKDSTYSLSSTLTLSKADYEKHKVYACEVTHQGLSSPVTKSFNRGEC

SEQ ID NO: 664 - DNA, 714 bp, Artificial Sequence
  Synthetic
atggacatgagggtgcccgctcagctcctggggctcctgctgctgtggctgagaggtgcgcgctgtgaaatcgtgatgacgcagtctccagccaccctgtctgtgtctccaggggaaagagccaccctctcctgcagggccagtcagagtgttaacgctaacttagcctggtaccagcagaaacctggccaagctcccaggctcctcatctatggtgcatccaccagggccactggtatcccagccaggttcagtggcagtgggtctgggacagagttcactctcaccatcagcagcctgcagtctgaagattttgcagtttattactgtcagcagttttataactttcctccgcatacgttcggccaggggaccaaggtggaaatcaaacgaacggtggctgcaccatctgtcttcatcttcccgccatctgatgagcagttgaaatctggaactgcctctgttgtgtgcctgctgaataacttctatcccagagaggccaaagtacagtggaaggtggataacgccctccaatcgggtaactcccaggagagtgtcacagagcaggacagcaaggacagcacctacagcctcagcagcaccctgacgctgagcaaagcagactacgagaaacacaaagtctacgcctgcgaagtcacccatcagggcctgagctcgcccgtcacaaagagcttcaacaggggagagtgttag

SEQ ID NO: 665 - protein, 215 aa, Artificial Sequence; identical to SEQ ID NO: 639
  Synthetic

SEQ ID NO: 666 - DNA, 714 bp, Artificial Sequence; identical to SEQ ID NO: 640
  Synthetic

SEQ ID NO: 667 - protein, 215 aa, Artificial Sequence
  Synthetic
EIVMTQSPATLSVSPGERATLSCRASQSVNHNLAWYQQKPGQAPRLLIYGASTRATGIPARFSGSGSGTEFTLTISSLQSEDFAVYYCQQFYNFPPWTFGQGTKVEIKRTVAAPSVFIFPPSDEQLKSGTASVVCLLNNFYPREAKVQWKVDNALQSGNSQESVTEQDSKDSTYSLSSTLTLSKADYEKHKVYACEVTHQGLSSPVTKSFNRGEC

SEQ ID NO: 668 - DNA, 714 bp, Artificial Sequence
  Synthetic
atggacatgagggtgcccgctcagctcctggggctcctgctgctgtggctgagaggtgcgcgctgtgaaatcgtgatgacgcagtctccagccaccctgtctgtgtctccaggggaaagagccaccctctcctgcagggccagtcagagtgttaaccataacttagcctggtaccagcagaaacctggccaagctcccaggctcctcatctatggtgcatccaccagggccactggtatcccagccaggttcagtggcagtgggtctgggacagagttcactctcaccatcagcagcctgcagtctgaagattttgcagtttattactgtcagcagttttataactttcctccgtggacgttcggccaggggaccaaggtggaaatcaaacgaacggtggctgcaccatctgtcttcatcttcccgccatctgatgagcagttgaaatctggaactgcctctgttgtgtgcctgctgaataacttctatcccagagaggccaaagtacagtggaaggtggataacgccctccaatcgggtaactcccaggagagtgtcacagagcaggacagcaaggacagcacctacagcctcagcagcaccctgacgctgagcaaagcagactacgagaaacacaaagtctacgcctgcgaagtcacccatcagggcctgagctcgcccgtcacaaagagcttcaacaggggagagtgttag

SEQ ID NO: 669 - protein, 215 aa, Artificial Sequence
  Synthetic
EIVMTQSPATLSVSPGERATLSCRASQSVNHNLAWYQQKPGQAPRLLIYGASTRATGIPARFSGSGSGTEFTLTISSLQSEDFAVYYCQQFYNWPPNTFGQGTKVEIKRTVAAPSVFIFPPSDEQLKSGTASVVCLLNNFYPREAKVQWKVDNALQSGNSQESVTEQDSKDSTYSLSSTLTLSKADYEKHKVYACEVTHQGLSSPVTKSFNRGEC

SEQ ID NO: 670 - DNA, 714 bp, Artificial Sequence
  Synthetic
atggacatgagggtgcccgctcagctcctggggctcctgctgctgtggctgagaggtgcgcgctgtgaaatcgtgatgacgcagtctccagccaccctgtctgtgtctccaggggaaagagccaccctctcctgcagggccagtcagagtgttaaccataacttagcctggtaccagcagaaacctggccaagctcccaggctcctcatctatggtgcatccaccagggccactggtatcccagccaggttcagtggcagtgggtctgggacagagttcactctcaccatcagcagcctgcagtctgaagattttgcagtttattactgtcagcagttttataactggcctccgaatacgttcggccaggggaccaaggtggaaatcaaacgaacggtggctgcaccatctgtcttcatcttcccgccatctgatgagcagttgaaatctggaactgcctctgttgtgtgcctgctgaataacttctatcccagagaggccaaagtacagtggaaggtggataacgccctccaatcgggtaactcccaggagagtgtcacagagcaggacagcaaggacagcacctacagcctcagcagcaccctgacgctgagcaaagcagactacgagaaacacaaagtctacgcctgcgaagtcacccatcagggcctgagctcgcccgtcacaaagagcttcaacaggggagagtgttag

SEQ ID NO: 671 - protein, 215 aa, Artificial Sequence
  Synthetic
EIVMTQSPATLSVSPGERATLSCRASQSVNHNLAWYQQKPGQAPRLLIYGASTRATGIPARFSGSGSGTEFTLTISSLQSEDFAVYYCQQFYNWPPYTFGQGTKVEIKRTVAAPSVFIFPPSDEQLKSGTASVVCLLNNFYPREAKVQWKVDNALQSGNSQESVTEQDSKDSTYSLSSTLTLSKADYEKHKVYACEVTHQGLSSPVTKSFNRGEC

SEQ ID NO: 672 - DNA, 714 bp, Artificial Sequence
  Synthetic
atggacatgagggtgcccgctcagctcctggggctcctgctgctgtggctgagaggtgcgcgctgtgaaatcgtgatgacgcagtctccagccaccctgtctgtgtctccaggggaaagagccaccctctcctgcagggccagtcagagtgttaaccataacttagcctggtaccagcagaaacctggccaagctcccaggctcctcatctatggtgcatccaccagggccactggtatcccagccaggttcagtggcagtgggtctgggacagagttcactctcaccatcagcagcctgcagtctgaagattttgcagtttattactgtcagcagttttataactggcctccgtatacgttcggccaggggaccaaggtggaaatcaaacgaacggtggctgcaccatctgtcttcatcttcccgccatctgatgagcagttgaaatctggaactgcctctgttgtgtgcctgctgaataacttctatcccagagaggccaaagtacagtggaaggtggataacgccctccaatcgggtaactcccaggagagtgtcacagagcaggacagcaaggacagcacctacagcctcagcagcaccctgacgctgagcaaagcagactacgagaaacacaaagtctacgcctgcgaagtcacccatcagggcctgagctcgcccgtcacaaagagcttcaacaggggagagtgttag

SEQ ID NO: 673 - protein, 215 aa, Artificial Sequence
  Synthetic
EIVMTQSPATLSVSPGERATLSCRASQSVNHNLAWYQQKPGQAPRLLIYGASTRATGIPARFSGSGSGTEFTLTISSLQSEDFAVYYCQQFYNFPPNTFGQGTKVEIKRTVAAPSVFIFPPSDEQLKSGTASVVCLLNNFYPREAKVQWKVDNALQSGNSQESVTEQDSKDSTYSLSSTLTLSKADYEKHKVYACEVTHQGLSSPVTKSFNRGEC

SEQ ID NO: 674 - DNA, 714 bp, Artificial Sequence
  Synthetic
atggacatgagggtgcccgctcagctcctggggctcctgctgctgtggctgagaggtgcgcgctgtgaaatcgtgatgacgcagtctccagccaccctgtctgtgtctccaggggaaagagccaccctctcctgcagggccagtcagagtgttaaccataacttagcctggtaccagcagaaacctggccaagctcccaggctcctcatctatggtgcatccaccagggccactggtatcccagccaggttcagtggcagtgggtctgggacagagttcactctcaccatcagcagcctgcagtctgaagattttgcagtttattactgtcagcagttttataactttcctccgaatacgttcggccaggggaccaaggtggaaatcaaacgaacggtggctgcaccatctgtcttcatcttcccgccatctgatgagcagttgaaatctggaactgcctctgttgtgtgcctgctgaataacttctatcccagagaggccaaagtacagtggaaggtggataacgccctccaatcgggtaactcccaggagagtgtcacagagcaggacagcaaggacagcacctacagcctcagcagcaccctgacgctgagcaaagcagactacgagaaacacaaagtctacgcctgcgaagtcacccatcagggcctgagctcgcccgtcacaaagagcttcaacaggggagagtgttag

SEQ ID NO: 675 - protein, 215 aa, Artificial Sequence
  Synthetic
EIVMTQSPATLSVSPGERATLSCRASQSVNHNLAWYQQKPGQAPRLLIYGASTRATGIPARFSGSGSGTEFTLTISSLQSEDFAVYYCQQFYNFPPYTFGQGTKVEIKRTVAAPSVFIFPPSDEQLKSGTASVVCLLNNFYPREAKVQWKVDNALQSGNSQESVTEQDSKDSTYSLSSTLTLSKADYEKHKVYACEVTHQGLSSPVTKSFNRGEC

SEQ ID NO: 676 - DNA, 714 bp, Artificial Sequence
  Synthetic
atggacatgagggtgcccgctcagctcctggggctcctgctgctgtggctgagaggtgcgcgctgtgaaatcgtgatgacgcagtctccagccaccctgtctgtgtctccaggggaaagagccaccctctcctgcagggccagtcagagtgttaaccataacttagcctggtaccagcagaaacctggccaagctcccaggctcctcatctatggtgcatccaccagggccactggtatcccagccaggttcagtggcagtgggtctgggacagagttcactctcaccatcagcagcctgcagtctgaagattttgcagtttattactgtcagcagttttataactttcctccgtatacgttcggccaggggaccaaggtggaaatcaaacgaacggtggctgcaccatctgtcttcatcttcccgccatctgatgagcagttgaaatctggaactgcctctgttgtgtgcctgctgaataacttctatcccagagaggccaaagtacagtggaaggtggataacgccctccaatcgggtaactcccaggagagtgtcacagagcaggacagcaaggacagcacctacagcctcagcagcaccctgacgctgagcaaagcagactacgagaaacacaaagtctacgcctgcgaagtcacccatcagggcctgagctcgcccgtcacaaagagcttcaacaggggagagtgttag

SEQ ID NO: 677 - protein, 214 aa, Artificial Sequence
  Synthetic
EIVMTQSPATLSVSPGERATLSCRASQSVSSNLAWYQQKSGQAPRLLIYGASIRATGIPARFSGSGSGTEFTFTISSLQSEDFAVYYCQQYKNWPLTFGGGTKVEIKRTVAAPSVFIFPPSDEQLKSGTASVVCLLNNFYPREAKVQWKVDNALQSGNSQESVTEQDSKDSTYSLSSTLTLSKADYEKHKVYACEVTHQGLSSPVTKSFNRGEC

SEQ ID NO: 678 - DNA, 711 bp, Artificial Sequence
  Synthetic
atggacatgagggtgcccgctcagctcctggggctcctgctgctgtggctgagaggtgcgcgctgtgaaatcgtgatgacgcagtctccagccaccctgtctgtgtctccaggggaaagagccaccctctcctgcagggccagtcagagtgttagcagcaacttagcctggtatcagcagaaatctggccaggctcccaggctcctcatctatggtgcatccatcagggccactggtatcccagccaggtttagcggcagtgggtctgggacagagttcaccttcactatcagcagcctgcagtctgaagattttgcagtctattactgtcagcagtataagaactggcctctcactttcggcggagggaccaaggtggagatcaaacgaacggtggctgcaccatctgtcttcatcttcccgccatctgatgagcagttgaaatctggaactgcctctgttgtgtgcctgctgaataacttctatcccagagaggccaaagtacagtggaaggtggataacgccctccaatcgggtaactcccaggagagtgtcacagagcaggacagcaaggacagcacctacagcctcagcagcaccctgacgctgagcaaagcagactacgagaaacacaaagtctacgcctgcgaagtcacccatcagggcctgagctcgcccgtcacaaagagcttcaacaggggagagtgttag

SEQ ID NO: 679 - protein, 214 aa, Artificial Sequence
  Synthetic
EIVMTQSPATLSVSPGERATLSCRASQSVSSNLAWYQQKPGQAPRLLIYGASIRATGIPARFSGSGSGTEFTFTISSLQSEDFAVYYCQQYKNWPLTFGGGTKVEIKRTVAAPSVFIFPPSDEQLKSGTASVVCLLNNFYPREAKVQWKVDNALQSGNSQESVTEQDSKDSTYSLSSTLTLSKADYEKHKVYACEVTHQGLSSPVTKSFNRGEC

SEQ ID NO: 680 - DNA, 711 bp, Artificial Sequence
  Synthetic
atggacatgagggtgcccgctcagctcctggggctcctgctgctgtggctgagaggtgcgcgctgtgaaatcgtgatgacgcagtctccagccaccctgtctgtgtctccaggggaaagagccaccctctcctgcagggccagtcagagtgttagcagcaacttagcctggtatcagcagaaacctggccaggctcccaggctcctcatctatggtgcatccatcagggccactggtatcccagccaggtttagcggcagtgggtctgggacagagttcaccttcactatcagcagcctgcagtctgaagattttgcagtctattactgtcagcagtataagaactggcctctcactttcggcggagggaccaaggtggagatcaaacgaacggtggctgcaccatctgtcttcatcttcccgccatctgatgagcagttgaaatctggaactgcctctgttgtgtgcctgctgaataacttctatcccagagaggccaaagtacagtggaaggtggataacgccctccaatcgggtaactcccaggagagtgtcacagagcaggacagcaaggacagcacctacagcctcagcagcaccctgacgctgagcaaagcagactacgagaaacacaaagtctacgcctgcgaagtcacccatcagggcctgagctcgcccgtcacaaagagcttcaacaggggagagtgttag

SEQ ID NO: 681 - protein, 214 aa, Artificial Sequence
  Synthetic
EIVMTQSPATLSVSPGERATLSCRASQSVSSNLAWYQQKSGQAPRLLIYGASIRATGIPARFSGSGSGTEFTLTISSLQSEDFAVYYCQQYKNWPLTFGGGTKVEIKRTVAAPSVFIFPPSDEQLKSGTASVVCLLNNFYPREAKVQWKVDNALQSGNSQESVTEQDSKDSTYSLSSTLTLSKADYEKHKVYACEVTHQGLSSPVTKSFNRGEC

SEQ ID NO: 682 - DNA, 711 bp, Artificial Sequence
  Synthetic
atggacatgagggtgcccgctcagctcctggggctcctgctgctgtggctgagaggtgcgcgctgtgaaatcgtgatgacgcagtctccagccaccctgtctgtgtctccaggggaaagagccaccctctcctgcagggccagtcagagtgttagcagcaacttagcctggtatcagcagaaatctggccaggctcccaggctcctcatctatggtgcatccatcagggccactggtatcccagccaggtttagcggcagtgggtctgggacagagttcacccttactatcagcagcctgcagtctgaagattttgcagtctattactgtcagcagtataagaactggcctctcactttcggcggagggaccaaggtggagatcaaacgaacggtggctgcaccatctgtcttcatcttcccgccatctgatgagcagttgaaatctggaactgcctctgttgtgtgcctgctgaataacttctatcccagagaggccaaagtacagtggaaggtggataacgccctccaatcgggtaactcccaggagagtgtcacagagcaggacagcaaggacagcacctacagcctcagcagcaccctgacgctgagcaaagcagactacgagaaacacaaagtctacgcctgcgaagtcacccatcagggcctgagctcgcccgtcacaaagagcttcaacaggggagagtgttag

SEQ ID NO: 683 - protein, 214 aa, Artificial Sequence; identical to SEQ ID NO: 677
  Synthetic

SEQ ID NO: 684 - DNA, 711 bp, Artificial Sequence; identical to SEQ ID NO: 678
  Synthetic

SEQ ID NO: 685 - protein, 214 aa, Artificial Sequence
  Synthetic
EIVMTQSPATLSVSPGERATLSCRASQSVSSNLAWYQQKSGQAPRLLIYGASIRATGIPARFSGSGSGTEFTFTISSLQSEDFAVYYCQQYKNFPLTFGGGTKVEIKRTVAAPSVFIFPPSDEQLKSGTASVVCLLNNFYPREAKVQWKVDNALQSGNSQESVTEQDSKDSTYSLSSTLTLSKADYEKHKVYACEVTHQGLSSPVTKSFNRGEC

SEQ ID NO: 686 - DNA, 711 bp, Artificial Sequence
  Synthetic
atggacatgagggtgcccgctcagctcctggggctcctgctgctgtggctgagaggtgcgcgctgtgaaatcgtgatgacgcagtctccagccaccctgtctgtgtctccaggggaaagagccaccctctcctgcagggccagtcagagtgttagcagcaacttagcctggtatcagcagaaatctggccaggctcccaggctcctcatctatggtgcatccatcagggccactggtatcccagccaggtttagcggcagtgggtctgggacagagttcaccttcactatcagcagcctgcagtctgaagattttgcagtctattactgtcagcagtataagaactttcctctcactttcggcggagggaccaaggtggagatcaaacgaacggtggctgcaccatctgtcttcatcttcccgccatctgatgagcagttgaaatctggaactgcctctgttgtgtgcctgctgaataacttctatcccagagaggccaaagtacagtggaaggtggataacgccctccaatcgggtaactcccaggagagtgtcacagagcaggacagcaaggacagcacctacagcctcagcagcaccctgacgctgagcaaagcagactacgagaaacacaaagtctacgcctgcgaagtcacccatcagggcctgagctcgcccgtcacaaagagcttcaacaggggagagtgttag

SEQ ID NO: 687 - protein, 214 aa, Artificial Sequence; identical to SEQ ID NO: 677
  Synthetic

SEQ ID NO: 688 - DNA, 711 bp, Artificial Sequence; identical to SEQ ID NO: 678
  Synthetic

SEQ ID NO: 689 - protein, 214 aa, Artificial Sequence; identical to SEQ ID NO: 677
  Synthetic

SEQ ID NO: 690 - DNA, 711 bp, Artificial Sequence; identical to SEQ ID NO: 678
  Synthetic

SEQ ID NO: 691 - protein, 214 aa, Artificial Sequence; identical to SEQ ID NO: 677
  Synthetic

SEQ ID NO: 692 - DNA, 711 bp, Artificial Sequence; identical to SEQ ID NO: 678
  Synthetic

SEQ ID NO: 693 - protein, 214 aa, Artificial Sequence; identical to SEQ ID NO: 677
  Synthetic

SEQ ID NO: 694 - DNA, 711 bp, Artificial Sequence; identical to SEQ ID NO: 678
  Synthetic

SEQ ID NO: 695 - protein, 214 aa, Artificial Sequence; identical to SEQ ID NO: 681
  Synthetic

SEQ ID NO: 696 - DNA, 711 bp, Artificial Sequence; identical to SEQ ID NO: 682
  Synthetic

SEQ ID NO: 697 - protein, 214 aa, Artificial Sequence
  Synthetic
EIVMTQSPATLSVSPGERATLSCRASQSVSSNLAWYQQKSGQAPRLLIYGASIRATGIPARFSGSGSGTEFTLTISSLQSEDFAVYYCQQYKNFPLTFGGGTKVEIKRTVAAPSVFIFPPSDEQLKSGTASVVCLLNNFYPREAKVQWKVDNALQSGNSQESVTEQDSKDSTYSLSSTLTLSKADYEKHKVYACEVTHQGLSSPVTKSFNRGEC

SEQ ID NO: 698 - DNA, 711 bp, Artificial Sequence
  Synthetic
atggacatgagggtgcccgctcagctcctggggctcctgctgctgtggctgagaggtgcgcgctgtgaaatcgtgatgacgcagtctccagccaccctgtctgtgtctccaggggaaagagccaccctctcctgcagggccagtcagagtgttagcagcaacttagcctggtatcagcagaaatctggccaggctcccaggctcctcatctatggtgcatccatcagggccactggtatcccagccaggtttagcggcagtgggtctgggacagagttcacccttactatcagcagcctgcagtctgaagattttgcagtctattactgtcagcagtataagaactttcctctcactttcggcggagggaccaaggtggagatcaaacgaacggtggctgcaccatctgtcttcatcttcccgccatctgatgagcagttgaaatctggaactgcctctgttgtgtgcctgctgaataacttctatcccagagaggccaaagtacagtggaaggtggataacgccctccaatcgggtaactcccaggagagtgtcacagagcaggacagcaaggacagcacctacagcctcagcagcaccctgacgctgagcaaagcagactacgagaaacacaaagtctacgcctgcgaagtcacccatcagggcctgagctcgcccgtcacaaagagcttcaacaggggagagtgttag

SEQ ID NO: 699 - protein, 214 aa, Artificial Sequence
  Synthetic
EIVMTQSPATLSVSPGERATLSCRASQSVSSNLAWYQQKPGQAPRLLIYGASIRATGIPARFSGSGSGTEFTLTISSLQSEDFAVYYCQQYKNWPLTFGGGTKVEIKRTVAAPSVFIFPPSDEQLKSGTASVVCLLNNFYPREAKVQWKVDNALQSGNSQESVTEQDSKDSTYSLSSTLTLSKADYEKHKVYACEVTHQGLSSPVTKSFNRGEC

SEQ ID NO: 700 - DNA, 711 bp, Artificial Sequence
  Synthetic
atggacatgagggtgcccgctcagctcctggggctcctgctgctgtggctgagaggtgcgcgctgtgaaatcgtgatgacgcagtctccagccaccctgtctgtgtctccaggggaaagagccaccctctcctgcagggccagtcagagtgttagcagcaacttagcctggtatcagcagaaacctggccaggctcccaggctcctcatctatggtgcatccatcagggccactggtatcccagccaggtttagcggcagtgggtctgggacagagttcacccttactatcagcagcctgcagtctgaagattttgcagtctattactgtcagcagtataagaactggcctctcactttcggcggagggaccaaggtggagatcaaacgaacggtggctgcaccatctgtcttcatcttcccgccatctgatgagcagttgaaatctggaactgcctctgttgtgtgcctgctgaataacttctatcccagagaggccaaagtacagtggaaggtggataacgccctccaatcgggtaactcccaggagagtgtcacagagcaggacagcaaggacagcacctacagcctcagcagcaccctgacgctgagcaaagcagactacgagaaacacaaagtctacgcctgcgaagtcacccatcagggcctgagctcgcccgtcacaaagagcttcaacaggggagagtgttag

SEQ ID NO: 701 - protein, 214 aa, Artificial Sequence
  Synthetic
EIVMTQSPATLSVSPGERATLSCRASQSVSSNLAWYQQKPGQAPRLLIYGASIRATGIPARFSGSGSGTEFTLTISSLQSEDFAVYYCQQYKNFPLTFGGGTKVEIKRTVAAPSVFIFPPSDEQLKSGTASVVCLLNNFYPREAKVQWKVDNALQSGNSQESVTEQDSKDSTYSLSSTLTLSKADYEKHKVYACEVTHQGLSSPVTKSFNRGEC

SEQ ID NO: 702 - DNA, 711 bp, Artificial Sequence
  Synthetic
atggacatgagggtgcccgctcagctcctggggctcctgctgctgtggctgagaggtgcgcgctgtgaaatcgtgatgacgcagtctccagccaccctgtctgtgtctccaggggaaagagccaccctctcctgcagggccagtcagagtgttagcagcaacttagcctggtatcagcagaaacctggccaggctcccaggctcctcatctatggtgcatccatcagggccactggtatcccagccaggtttagcggcagtgggtctgggacagagttcacccttactatcagcagcctgcagtctgaagattttgcagtctattactgtcagcagtataagaactttcctctcactttcggcggagggaccaaggtggagatcaaacgaacggtggctgcaccatctgtcttcatcttcccgccatctgatgagcagttgaaatctggaactgcctctgttgtgtgcctgctgaataacttctatcccagagaggccaaagtacagtggaaggtggataacgccctccaatcgggtaactcccaggagagtgtcacagagcaggacagcaaggacagcacctacagcctcagcagcaccctgacgctgagcaaagcagactacgagaaacacaaagtctacgcctgcgaagtcacccatcagggcctgagctcgcccgtcacaaagagcttcaacaggggagagtgttag

SEQ ID NO: 703 - protein, 214 aa, Artificial Sequence; identical to SEQ ID NO: 699
  Synthetic

SEQ ID NO: 704 - DNA, 711 bp, Artificial Sequence; identical to SEQ ID NO: 700
  Synthetic

SEQ ID NO: 705 - protein, 214 aa, Artificial Sequence; identical to SEQ ID NO: 681
  Synthetic

SEQ ID NO: 706 - DNA, 711 bp, Artificial Sequence; identical to SEQ ID NO: 682
  Synthetic

SEQ ID NO: 707 - protein, 214 aa, Artificial Sequence; identical to SEQ ID NO: 701
  Synthetic

SEQ ID NO: 708 - DNA, 711 bp, Artificial Sequence; identical to SEQ ID NO: 702
  Synthetic

SEQ ID NO: 709 - protein, 214 aa, Artificial Sequence; identical to SEQ ID NO: 697
  Synthetic

SEQ ID NO: 710 - DNA, 711 bp, Artificial Sequence; identical to SEQ ID NO: 698
  Synthetic

SEQ ID NO: 711 - protein, 214 aa, Artificial Sequence
  Synthetic
EIVMTQSPATLSVSPGERATLSCRASQSVSSNLAWYQQKSGQAPRLLIYGASIRATGIPARVSGSGSGTEFTFTISSLQSEDFAVYYCQQYKNWPLTFGGGTKVEIKRTVAAPSVFIFPPSDEQLKSGTASVVCLLNNFYPREAKVQWKVDNALQSGNSQESVTEQDSKDSTYSLSSTLTLSKADYEKHKVYACEVTHQGLSSPVTKSFNRGEC

SEQ ID NO: 712 - DNA, 711 bp, Artificial Sequence
  Synthetic
atggacatgagggtgcccgctcagctcctggggctcctgctgctgtggctgagaggtgcgcgctgtgaaatcgtgatgacgcagtctccagccaccctgtctgtgtctccaggggaaagagccaccctctcctgcagggccagtcagagtgttagcagcaacttagcctggtatcagcagaaatctggccaggctcccaggctcctcatctatggtgcatccatcagggccactggtatcccagccagggtcagcggcagtgggtctgggacagagttcaccttcactatcagcagcctgcagtctgaagattttgcagtctattactgtcagcagtataagaactggcctctcactttcggcggagggaccaaggtggagatcaaacgaacggtggctgcaccatctgtcttcatcttcccgccatctgatgagcagttgaaatctggaactgcctctgttgtgtgcctgctgaataacttctatcccagagaggccaaagtacagtggaaggtggataacgccctccaatcgggtaactcccaggagagtgtcacagagcaggacagcaaggacagcacctacagcctcagcagcaccctgacgctgagcaaagcagactacgagaaacacaaagtctacgcctgcgaagtcacccatcagggcctgagctcgcccgtcacaaagagcttcaacaggggagagtgttag

SEQ ID NO: 713 - protein, 451 aa, Artificial Sequence
  Synthetic
QVQLVQSGAEVTKPGASVKVSCKASGYTFTRYDINWVRQATGQGLEWMGWMNPNSGNSGSVQKFRGRVTMTRDTSITTVYMELSSLRSDDTAVYYCARGGISSSWHWAFDIWGQGTMVTVSSASTKGPSVFPLAPSSKSTSGGTAALGCLVKDYFPEPVTVSWNSGALTSGVHTFPAVLQSSGLYSLSSVVTVPSSSLGTQTYICNVNHKPSNTKVDKKVEPKSCDKTHTCPPCPAPELLGGPSVFLFPPKPKDTLMISRTPEVTCVVVDVSHEDPEVKFNWYVDGVEVHNAKTKPCEEQYGSTYRCVSVLTVLHQDWLNGKEYKCKVSNKALPAPIEKTISKAKGQPREPQVYTLPPSREEMTKNQVSLTCLVKGFYPSDIAVEWESNGQPENNYDTTPPVLDSDGSFFLYSDLTVDKSRWQQGNVFSCSVMHEALHNHYTQDSLSLSPG

SEQ ID NO: 714 - protein, 214 aa, Artificial Sequence; identical to SEQ ID NO: 410
  Synthetic

SEQ ID NO: 715 - protein, 215 aa, Artificial Sequence; identical to SEQ ID NO: 607
  Synthetic

SEQ ID NO: 716 - protein, 214 aa, Artificial Sequence
  Synthetic
DIQMTQSPSSLSASVGDRVTITCQASQDIRKHLNWYQQKPGKAPNLLIYDAANLETGVPSRFSGSGSGTAFTFTISSLQPEDIATYYCQHYANLPITFGQGTRLEIKRTVAAPSVFIFPPSDEQLKSGTASVVCLLNNFYPREAKVQWKVDNALQSGNSQESVTEQDSKDSTYSLSSTLTLSKADYEKHKVYACEVTHQGLSSPVTKSFNRGEC

SEQ ID NO: 717 - protein, 211 aa, Artificial Sequence
  Synthetic
SYELTQPPSVSVSPGQTASITCSGDKLGERNVSWYQLKPGQSPILVIYQDNKRPSGIPERFSGSKSGNTAILTISGTQAMDEADYYCQAWDRNVVFGGGTKLTVLGQPKAAPSVTLFPPSSEELQANKATLVCLISDFYPGAVTVAWKADSSPVKAGVETTTPSKQSNNKYAASSYLSLTPEQWKSHRSYSCQVTHEGSTVEKTVAPTECS

SEQ ID NO: 718 - protein, 215 aa, Artificial Sequence
  Synthetic
EIVMTQSPAILSVSPGERATLSCRASQSVSSNLAWYQQKPGQAPRLLIYGASTRATGVPARFSGGGSGTDFTLTISSLQSEDFAVYYCQHFKTWPPLTFGGGTKVEIKRTVAAPSVFIFPPSDEQLKSGTASVVCLLNNFYPREAKVQWKVDNALQSGNSQESVTEQDSKDSTYSLSSTLTLSKADYEKHKVYACEVTHQGLSSPVTKSFNRGEC

SEQ ID NO: 719 - protein, 215 aa, Artificial Sequence
  Synthetic
EIVMTQSPATLSVSPGERATLSCRASQSVNSNLAWYQQKPGRAPRLLIYGASTRATGIPARFSGSGSGTEFTLTISSLQSEDFAVYYCQQFYNWPPWTFGQGTKVEIKRTVAAPSVFIFPPSDEQLKSGTASVVCLLNNFYPREAKVQWKVDNALQSGNSQESVTEQDSKDSTYSLSSTLTLSKADYEKHKVYACEVTHQGLSSPVTKSFNRGEC

SEQ ID NO: 720 - protein, 214 aa, Artificial Sequence; identical to SEQ ID NO: 711
  Synthetic

SEQ ID NO: 721 - protein, 214 aa, Artificial Sequence
  Synthetic
DIQMTQSPSSVSASVGDRVTITCRASQGIRKWLAWYQQKPGRAPKLLIYAASRLQSGVPSRFSGSGSGTDFTLTISSLRPEDFATYYCLQAHGFPWTFGQGTKVEIKRTVAAPSVFIFPPSDEQLKSGTASVVCLLNNFYPREAKVQWKVDNALQSGNSQESVTEQDSKDSTYSLSSTLTLSKADYEKHKVYACEVTHQGLSSPVTKSFNRGEC

SEQ ID NO: 722 - protein, 214 aa, Artificial Sequence
  Synthetic
DIQMTQSPSSLSASVGDRVTITCQASQDINNHLNWYQQKPGKAPKLLIYDVSNLETGVPSSFSGSGSGTDFTFTISSLQPEDIATYFCQQYDKLPLTFGGGTKVEIKRTVAAPSVFIFPPSDEQLKSGTASVVCLLNNFYPREAKVQWKVDNALQSGNSQESVTEQDSKDSTYSLSSTLTLSKADYEKHKVYACEVTHQGLSSPVTKSFNRGEC

SEQ ID NO: 723 - protein, 214 aa, Artificial Sequence
  Synthetic
DIQMTQSPSSLSASVGDRVTITCRASQSISSNLNWYQQKPGKAPKLLISAASNLQSGVPSRFSGSESGTDFTLTISSLQSEDFATYYCQQSDSLPLTFGGGTKVEIKRTVAAPSVFIFPPSDEQLKSGTASVVCLLNNFYPREAKVQWKVDNALQSGNSQESVTEQDSKDSTYSLSSTLTLSKADYEKHKVYACEVTHQGLSSPVTKSFNRGEC

SEQ ID NO: 724 - protein, 214 aa, Artificial Sequence; identical to SEQ ID NO: 410
  Synthetic

SEQ ID NO: 725 - protein, 214 aa, Artificial Sequence
  Synthetic
DIQMTQSPSSLSASVGDRVTITCQASRDISKYLNWYQQKPGKAPKLQIYDASNLETGVPSRFSGSGSGTDFTFTISSLQPEDIATYYCQHYDNIPITFGQGTRLEIKRTVAAPSVFIFPPSDEQLKSGTASVVCLLNNFYPREAKVQWKVDNALQSGNSQESVTEQDSKDSTYSLSSTLTLSKADYEKHKVYACEVTHQGLSSPVTKSFNRGEC

SEQ ID NO: 726 - protein, 214 aa, Artificial Sequence
  Synthetic
DIQMTQSPSSLSASVGDRVTITCQASQDISKHLNWYQQKPGKAPKLLIYDTSNLETGVPSRFSGSGSGTDFTFTISSLQPEDIATYNCQQYDKLPLTFGGGTKVEIKRTVAAPSVFIFPPSDEQLKSGTASVVCLLNNFYPREAKVQWKVDNALQSGNSQESVTEQDSKDSTYSLSSTLTLSKADYEKHKVYACEVTHQGLSSPVTKSFNRGEC

SEQ ID NO: 727 - protein, 214 aa, Artificial Sequence
  Synthetic
DTQMTQSPSSLSASEGDRVTITCQASQDIFNDLNWYQEKPGKAPKLLIYHASNLETGVPSRFSGSGSGTDYTFTISSLQPEDIATYYCQQYGNLPLTFGGGTKVEIKRTVAAPSVFIFPPSDEQLKSGTASVVCLLNNFYPREAKVQWKVDNALQSGNSQESVTEQDSKDSTYSLSSTLTLSKADYEKHKVYACEVTHQGLSSPVTKSFNRGEC

SEQ ID NO: 728 - protein, 214 aa, Artificial Sequence
  Synthetic
DIQMTQFPSSVSASVGDRVTITCRASQGISRWLAWYQQKQGKAPKLLIYMVSSLQSGVPSRFSGSGSGTDFTLTISSLQPEDFATYYCQQSHNFPITFGQGTRLDIKRTVAAPSVFIFPPSDEQLKSGTASVVCLLNNFYPREAKVQWKVDNALQSGNSQESVTEQDSKDSTYSLSSTLTLSKADYEKHKVYACEVTHQGLSSPVTKSFNRGEC

SEQ ID NO: 729 - protein, 214 aa, Artificial Sequence; identical to SEQ ID NO: 716
  Synthetic

SEQ ID NO: 730 - protein, 215 aa, Artificial Sequence; identical to SEQ ID NO: 718
  Synthetic

SEQ ID NO: 731 - protein, 214 aa, Artificial Sequence; identical to SEQ ID NO: 721
  Synthetic

SEQ ID NO: 732 - protein, 214 aa, Artificial Sequence; identical to SEQ ID NO: 722
  Synthetic

SEQ ID NO: 733 - protein, 214 aa, Artificial Sequence; identical to SEQ ID NO: 725
  Synthetic

SEQ ID NO: 734 - protein, 214 aa, Artificial Sequence; identical to SEQ ID NO: 727
  Synthetic

SEQ ID NO: 735 - protein, 214 aa, Artificial Sequence; identical to SEQ ID NO: 728
  Synthetic

SEQ ID NO: 736 - protein, 214 aa, Artificial Sequence
  Synthetic
DIQMTQSPSSLSASVGDRVTITCQASQDINNHLNWYQQKPGKAPKLLIYDVSNLETGVPSRFSGSGSGTDFTFTISSLQPEDIATYYCQQYDKLPLTFGGGTKVEIKRTVAAPSVFIFPPSDEQLKSGTASVVCLLNNFYPREAKVQWKVDNALQSGNSQESVTEQDSKDSTYSLSSTLTLSKADYEKHKVYACEVTHQGLSSPVTKSFNRGEC

SEQ ID NO: 737 - protein, 214 aa, Artificial Sequence; identical to SEQ ID NO: 736
  Synthetic

SEQ ID NO: 738 - protein, 214 aa, Artificial Sequence
  Synthetic
DIQMTQSPSSVSASVGDRVTITCRASQGISRWLAWYQQKQGKAPKLLIYMVSSLQSGVPSRFSGSGSGTDFTLTISSLQPEDFATYYCQQSHNFPITFGQGTRLDIKRTVAAPSVFIFPPSDEQLKSGTASVVCLLNNFYPREAKVQWKVDNALQSGNSQESVTEQDSKDSTYSLSSTLTLSKADYEKHKVYACEVTHQGLSSPVTKSFNRGEC

SEQ ID NO: 739 - protein, 214 aa, Artificial Sequence; identical to SEQ ID NO: 738
  Synthetic

SEQ ID NO: 740 - protein, 214 aa, Artificial Sequence; identical to SEQ ID NO: 738
  Synthetic

SEQ ID NO: 741 - protein, 214 aa, Artificial Sequence
  Synthetic
DIQMTQSPSSVSASVGDRVTITCRASQGISRWLAWYQQKPGKAPKLLIYMVSSLQSGVPSRFSGSGSGTDFTLTISSLQPEDFATYYCQQSHNFPITFGQGTRLDIKRTVAAPSVFIFPPSDEQLKSGTASVVCLLNNFYPREAKVQWKVDNALQSGNSQESVTEQDSKDSTYSLSSTLTLSKADYEKHKVYACEVTHQGLSSPVTKSFNRGEC

SEQ ID NO: 742 - protein, 214 aa, Artificial Sequence; identical to SEQ ID NO: 738
  Synthetic

SEQ ID NO: 743 - protein, 214 aa, Artificial Sequence
  Synthetic
DTQMTQSPSSLSASVGDRVTITCQASQDIFNDLNWYQEKPGKAPKLLIYHASNLETGVPSRFSGSGSGTDFTFTISSLQPEDIATYYCQQYGNLPLTFGGGTKVEIKRTVAAPSVFIFPPSDEQLKSGTASVVCLLNNFYPREAKVQWKVDNALQSGNSQESVTEQDSKDSTYSLSSTLTLSKADYEKHKVYACEVTHQGLSSPVTKSFNRGEC

SEQ ID NO: 744 - protein, 214 aa, Artificial Sequence
  Synthetic
DTQMTQSPSSLSASVGDRVTITCQASQDIFNDLNWYQQKPGKAPKLLIYHASNLETGVPSRFSGSGSGTDYTFTISSLQPEDIATYYCQQYGNLPLTFGGGTKVEIKRTVAAPSVFIFPPSDEQLKSGTASVVCLLNNFYPREAKVQWKVDNALQSGNSQESVTEQDSKDSTYSLSSTLTLSKADYEKHKVYACEVTHQGLSSPVTKSFNRGEC

SEQ ID NO: 745 - protein, 214 aa, Artificial Sequence
  Synthetic
DTQMTQSPSSLSASVGDRVTITCQASQDIFNDLNWYQEKPGKAPKLLIYHASNLETGVPSRFSGSGSGTDYTFTISSLQPEDIATYYCQQYGNLPLTFGGGTKVEIKRTVAAPSVFIFPPSDEQLKSGTASVVCLLNNFYPREAKVQWKVDNALQSGNSQESVTEQDSKDSTYSLSSTLTLSKADYEKHKVYACEVTHQGLSSPVTKSFNRGEC

SEQ ID NO: 746 - protein, 214 aa, Artificial Sequence
  Synthetic
DIQMTQSPSSLSASVGDRVTITCQASRDISKYLNWYQQKPGKAPKLLIYDASNLETGVPSRFSGSGSGTDFTFTISSLQPEDFATYYCQHYDNIPITFGQGTRLEIKRTVAAPSVFIFPPSDEQLKSGTASVVCLLNNFYPREAKVQWKVDNALQSGNSQESVTEQDSKDSTYSLSSTLTLSKADYEKHKVYACEVTHQGLSSPVTKSFNRGEC

SEQ ID NO: 747 - protein, 214 aa, Artificial Sequence
  Synthetic
DIQMTQSPSSLSASVGDRVTITCQASRDISKYLNWYQQKPGKAPKLLIYDASNLETGVPSRFSGSGSGTDFTFTISSLQPEDIATYYCQHYDNIPITFGQGTRLEIKRTVAAPSVFIFPPSDEQLKSGTASVVCLLNNFYPREAKVQWKVDNALQSGNSQESVTEQDSKDSTYSLSSTLTLSKADYEKHKVYACEVTHQGLSSPVTKSFNRGEC

SEQ ID NO: 748 - protein, 214 aa, Artificial Sequence; identical to SEQ ID NO: 746
  Synthetic

SEQ ID NO: 749 - protein, 214 aa, Artificial Sequence; identical to SEQ ID NO: 747
  Synthetic

SEQ ID NO: 750 - protein, 214 aa, Artificial Sequence; identical to SEQ ID NO: 746
  Synthetic

SEQ ID NO: 751 - protein, 214 aa, Artificial Sequence; identical to SEQ ID NO: 746
  Synthetic

SEQ ID NO: 752 - protein, 214 aa, Artificial Sequence; identical to SEQ ID NO: 746
  Synthetic

SEQ ID NO: 753 - protein, 214 aa, Artificial Sequence; identical to SEQ ID NO: 747
  Synthetic

SEQ ID NO: 754 - protein, 214 aa, Artificial Sequence; identical to SEQ ID NO: 721
  Synthetic

SEQ ID NO: 755 - protein, 214 aa, Artificial Sequence; identical to SEQ ID NO: 721
  Synthetic

SEQ ID NO: 756 - protein, 214 aa, Artificial Sequence; identical to SEQ ID NO: 721
  Synthetic

SEQ ID NO: 757 - protein, 214 aa, Artificial Sequence
  Synthetic
DIQMTQSPSSLSASVGDRVTITCQASQDIRKHLNWYQQKPGKAPKLLIYDAANLETGVPSRFSGSGSGTDFTFTISSLQPEDFATYYCQHYANLPITFGQGTRLEIKRTVAAPSVFIFPPSDEQLKSGTASVVCLLNNFYPREAKVQWKVDNALQSGNSQESVTEQDSKDSTYSLSSTLTLSKADYEKHKVYACEVTHQGLSSPVTKSFNRGEC

SEQ ID NO: 758 - protein, 214 aa, Artificial Sequence; identical to SEQ ID NO: 716
  Synthetic

SEQ ID NO: 759 - protein, 214 aa, Artificial Sequence; identical to SEQ ID NO: 757
  Synthetic

SEQ ID NO: 760 - protein, 214 aa, Artificial Sequence; identical to SEQ ID NO: 716
  Synthetic

SEQ ID NO: 761 - protein, 214 aa, Artificial Sequence; identical to SEQ ID NO: 757
  Synthetic

SEQ ID NO: 762 - protein, 214 aa, Artificial Sequence; identical to SEQ ID NO: 757
  Synthetic

SEQ ID NO: 763 - protein, 214 aa, Artificial Sequence; identical to SEQ ID NO: 757
  Synthetic

SEQ ID NO: 764 - protein, 214 aa, Artificial Sequence
  Synthetic
DIQMTQSPSSLSASVGDRVTITCQASQDIRKHLNWYQQKPGKAPKLLIYDAANLETGVPSRFSGSGSGTDFTLTISSLQPEDFATYYCQHYANLPITFGQGTRLEIKRTVAAPSVFIFPPSDEQLKSGTASVVCLLNNFYPREAKVQWKVDNALQSGNSQESVTEQDSKDSTYSLSSTLTLSKADYEKHKVYACEVTHQGLSSPVTKSFNRGEC

SEQ ID NO: 765 - protein, 214 aa, Artificial Sequence; identical to SEQ ID NO: 716
  Synthetic

SEQ ID NO: 766 - protein, 214 aa, Artificial Sequence; identical to SEQ ID NO: 716
  Synthetic

SEQ ID NO: 767 - protein, 214 aa, Artificial Sequence; identical to SEQ ID NO: 757
  Synthetic

SEQ ID NO: 768 - protein, 211 aa, Artificial Sequence
  Synthetic
SYELTQPPSVSVSPGQTASITCSGDKLGERQVSWYQQKPGQSPVLVIYQDNKRPSGIPERFSGSKSGNTATLTISGTQAMDEADYYCQAWDRNVVFGGGTKLTVLGQPKAAPSVTLFPPSSEELQANKATLVCLISDFYPGAVTVAWKADSSPVKAGVETTTPSKQSNNKYAASSYLSLTPEQWKSHRSYSCQVTHEGSTVEKTVAPTECS

SEQ ID NO: 769 - protein, 211 aa, Artificial Sequence
  Synthetic
SYELTQPPSVSVSPGQTASITCSGDKLGERQVSWYQLKPGQSPVLVIYQDNKRPSGIPERFSGSKSGNTATLTISGTQAMDEADYYCQAWDRNVVFGGGTKLTVLGQPKAAPSVTLFPPSSEELQANKATLVCLISDFYPGAVTVAWKADSSPVKAGVETTTPSKQSNNKYAASSYLSLTPEQWKSHRSYSCQVTHEGSTVEKTVAPTECS

SEQ ID NO: 770 - protein, 211 aa, Artificial Sequence
  Synthetic
SYELTQPPSVSVSPGQTASITCSGDKLGERNVGWYQQKPGQSPVLVIYQDNKRPSGIPERFSGSKSGNTATLTISGTQAMDEADYYCQAWDRNVVFGGGTKLTVLGQPKAAPSVTLFPPSSEELQANKATLVCLISDFYPGAVTVAWKADSSPVKAGVETTTPSKQSNNKYAASSYLSLTPEQWKSHRSYSCQVTHEGSTVEKTVAPTECS

SEQ ID NO: 771 - protein, 211 aa, Artificial Sequence
  Synthetic
SYELTQPPSVSVSPGQTASITCSGDKLGERNVAWYQQKPGQSPVLVIYQDNKRPSGIPERFSGSKSGNTATLTISGTQAMDEADYYCQAWDRNVVFGGGTKLTVLGQPKAAPSVTLFPPSSEELQANKATLVCLISDFYPGAVTVAWKADSSPVKAGVETTTPSKQSNNKYAASSYLSLTPEQWKSHRSYSCQVTHEGSTVEKTVAPTECS

SEQ ID NO: 772 - protein, 211 aa, Artificial Sequence; identical to SEQ ID NO: 769
  Synthetic

SEQ ID NO: 773 - protein, 215 aa, Artificial Sequence
  Synthetic
EIVMTQSPATLSVSPGERATLSCRASQSVSSNLAWYQQKPGQAPRLLIYGASTRATGIPARFSGSGSGTDFTLTISSLQPEDFAVYYCQHFKTWPPLTFGGGTKVEIKRTVAAPSVFIFPPSDEQLKSGTASVVCLLNNFYPREAKVQWKVDNALQSGNSQESVTEQDSKDSTYSLSSTLTLSKADYEKHKVYACEVTHQGLSSPVTKSFNRGEC

SEQ ID NO: 774 - protein, 215 aa, Artificial Sequence
  Synthetic
EIVMTQSPATLSVSPGERATLSCRASQSVSSNLAWYQQKPGQAPRLLIYGASTRATGIPARFSGSGSGTDFTLTISSLQSEDFAVYYCQHFKTYPPLTFGGGTKVEIKRTVAAPSVFIFPPSDEQLKSGTASVVCLLNNFYPREAKVQWKVDNALQSGNSQESVTEQDSKDSTYSLSSTLTLSKADYEKHKVYACEVTHQGLSSPVTKSFNRGEC

SEQ ID NO: 775 - protein, 215 aa, Artificial Sequence
  Synthetic
EIVMTQSPATLSVSPGERATLSCRASQSVSSNLAWYQQKPGQAPRLLIYGASTRATGIPARFSGSGSGTDFTLTISSLQSEDFAVYYCQHFKTFPPLTFGGGTKVEIKRTVAAPSVFIFPPSDEQLKSGTASVVCLLNNFYPREAKVQWKVDNALQSGNSQESVTEQDSKDSTYSLSSTLTLSKADYEKHKVYACEVTHQGLSSPVTKSFNRGEC

SEQ ID NO: 776 - protein, 215 aa, Artificial Sequence
  Synthetic
EIVMTQSPATLSVSPGERATLSCRASQSVSSNLAWYQQKPGQAPRLLIYGASTRATGIPARFSGSGSGTDFTLTISSLQSEDFAVYYCQHFKTHPPLTFGGGTKVEIKRTVAAPSVFIFPPSDEQLKSGTASVVCLLNNFYPREAKVQWKVDNALQSGNSQESVTEQDSKDSTYSLSSTLTLSKADYEKHKVYACEVTHQGLSSPVTKSFNRGEC

SEQ ID NO: 777 - protein, 215 aa, Artificial Sequence
  Synthetic
EIVMTQSPATLSVSPGERATLSCRASQSVSSNLAWYQQKPGQAPRLLIYGASTRATGIPARFSGSGSGTDFTLTISSLQPEDFAVYYCQHFKTYPPLTFGGGTKVEIKRTVAAPSVFIFPPSDEQLKSGTASVVCLLNNFYPREAKVQWKVDNALQSGNSQESVTEQDSKDSTYSLSSTLTLSKADYEKHKVYACEVTHQGLSSPVTKSFNRGEC

SEQ ID NO: 778 - DNA, 714 bp, Artificial Sequence; identical to SEQ ID NO: 608
  Synthetic

SEQ ID NO: 779 - DNA, 711 bp, Artificial Sequence
  Synthetic
atggacatgagggtgcccgctcagctcctggggctcctgctgctgtggctgagaggtgcgcgctgtgacatccagatgacccagtctccatcctccctgtctgcatctgtaggagacagagtcaccatcacttgccaggcgagtcaggacattaggaaacatttaaattggtatcagcagaaaccagggaaagcccctaacctcctgatctacgatgcagccaatttggaaacaggggtcccatcaaggttcagtggaagtggttctgggacagcttttactttcaccatcagcagcctgcagcctgaagatattgcaacatattactgtcaacactatgctaatctcccgatcaccttcggccaagggacacgactggagattaaacgaacggtggctgcaccatctgtcttcatcttcccgccatctgatgagcagttgaaatctggaactgcctctgttgtgtgcctgctgaataacttctatcccagagaggccaaagtacagtggaaggtggataacgccctccaatcgggtaactcccaggagagtgtcacagagcaggacagcaaggacagcacctacagcctcagcagcaccctgacgctgagcaaagcagactacgagaaacacaaagtctacgcctgcgaagtcacccatcagggcctgagctcgcccgtcacaaagagcttcaacaggggagagtgttag

SEQ ID NO: 780 - DNA, 693 bp, Artificial Sequence
  Synthetic
atggcctgggctctgctgctcctcaccctcctcactcagggcacagggtcctgggcctcctatgagctgactcagccaccctcagtgtccgtgtccccaggacagacagccagcatcacctgctctggagataaattgggggagagaaatgttagctggtatcagttgaagccaggccagtcccctattctggtcatctatcaagataacaagcggccctcagggatccctgagcgattctctggctccaagtctgggaacacagccattctgaccatcagcgggacccaggcaatggatgaggctgactattactgtcaggcgtgggacagaaatgtggtattcggcggagggaccaagctgaccgtcctaggtcagcccaaggctgcaccctcggtcactctgttcccgccctcctctgaggagcttcaagccaacaaggccacactggtgtgtctcatcagtgacttctacccgggagccgtgacagtggcctggaaggcagatagcagccccgtcaaggcgggagtggaaaccaccacaccctccaaacaaagcaacaacaagtacgcggccagcagctatctgagcctgacgcctgagcagtggaagtcccacagaagctacagctgccaggtcacgcatgaagggagcaccgtggagaagacagtggcccctacagaatgttcatag

SEQ ID NO: 781 - DNA, 714 bp, Artificial Sequence
  Synthetic
atggacatgagggtgcccgctcagctcctggggctcctgctgctgtggctgagaggtgcgcgctgtgaaatcgtgatgacgcagtctccagccatcctgtctgtgtctccaggggaaagagccaccctctcctgcagggccagtcagagtgttagcagcaacttagcctggtaccagcagaaacctggccaggctcccaggctcctcatctatggtgcatccaccagggccacgggtgtcccagccaggttcagtggcggtgggtctgggacagacttcactctcaccatcagcagcctgcagtctgaagattttgcagtttattactgtcagcacttcaagacctggcctccgctcactttcggcggagggaccaaggtggagatcaaacgaacggtggctgcaccatctgtcttcatcttcccgccatctgatgagcagttgaaatctggaactgcctctgttgtgtgcctgctgaataacttctatcccagagaggccaaagtacagtggaaggtggataacgccctccaatcgggtaactcccaggagagtgtcacagagcaggacagcaaggacagcacctacagcctcagcagcaccctgacgctgagcaaagcagactacgagaaacacaaagtctacgcctgcgaagtcacccatcagggcctgagctcgcccgtcacaaagagcttcaacaggggagagtgttag

SEQ ID NO: 782 - DNA, 714 bp, Artificial Sequence
  Synthetic
atggacatgagggtgcccgctcagctcctggggctcctgctgctgtggctgagaggtgcgcgctgtgaaatcgtgatgacgcagtctccagccaccctgtctgtgtctccaggggaaagagccaccctctcctgcagggccagtcagagtgttaacagcaacttagcctggtaccagcagaaacctggccgggctcccaggctcctcatctatggtgcatccaccagggccactggtatcccagccaggttcagtggcagtgggtctgggacagagttcactctcaccatcagcagcctgcagtctgaagattttgcagtttattactgtcagcagttttataactggcctccgtggacgttcggccaggggaccaaggtggaaatcaaacgaacggtggctgcaccatctgtcttcatcttcccgccatctgatgagcagttgaaatctggaactgcctctgttgtgtgcctgctgaataacttctatcccagagaggccaaagtacagtggaaggtggataacgccctccaatcgggtaactcccaggagagtgtcacagagcaggacagcaaggacagcacctacagcctcagcagcaccctgacgctgagcaaagcagactacgagaaacacaaagtctacgcctgcgaagtcacccatcagggcctgagctcgcccgtcacaaagagcttcaacaggggagagtgttag

SEQ ID NO: 783 - DNA, 711 bp, Artificial Sequence; identical to SEQ ID NO: 712
  Synthetic

SEQ ID NO: 784 - DNA, 711 bp, Artificial Sequence
  Synthetic
atggacatgagggtgcccgctcagctcctggggctcctgctgctgtggctgagaggtgcgcgctgtgacatccagatgacccagtctccatcttccgtgtctgcatctgtaggagacagagtcaccatcacttgtcgggcgagtcagggtattcgcaagtggttagcctggtatcagcagaaaccagggagggcccctaagctcctgatctatgctgcatcccgtttgcaaagtggggtcccatcaaggttcagcggcagtggatctgggacagatttcactctcaccatcagcagcctgcggcctgaagattttgcaacttactattgtcttcaggctcacggtttcccgtggacgttcggccaagggaccaaggtggaaatcaaacgaacggtggctgcaccatctgtcttcatcttcccgccatctgatgagcagttgaaatctggaactgcctctgttgtgtgcctgctgaataacttctatcccagagaggccaaagtacagtggaaggtggataacgccctccaatcgggtaactcccaggagagtgtcacagagcaggacagcaaggacagcacctacagcctcagcagcaccctgacgctgagcaaagcagactacgagaaacacaaagtctacgcctgcgaagtcacccatcagggcctgagctcgcccgtcacaaagagcttcaacaggggagagtgttag

SEQ ID NO: 785 - DNA, 711 bp, Artificial Sequence
  Synthetic
atggacatgagggtgcccgctcagctcctggggctcctgctgctgtggctgagaggtgcgcgctgtgacatccagatgacccagtctccatcctccctgtctgcatctgtaggagacagagtcaccatcacttgccaggcgagtcaggacattaacaaccatttaaattggtatcagcagaaaccagggaaagcccctaagctcctgatctacgatgtatccaatttggaaacaggggtcccatcaagtttcagtggaagtggaagcgggacagattttactttcaccatcagcagcctgcagcctgaagatatcgcaacatatttctgtcaacagtatgataaactcccgctcacttttggcggagggaccaaggtggagatcaagcgcacggtggctgcaccatctgtcttcatcttcccgccatctgatgagcagttgaaatctggaactgcctctgttgtgtgcctgctgaataacttctatcccagagaggccaaagtacagtggaaggtggataacgccctccaatcgggtaactcccaggagagtgtcacagagcaggacagcaaggacagcacctacagcctcagcagcaccctgacgctgagcaaagcagactacgagaaacacaaagtctacgcctgcgaagtcacccatcagggcctgagctcgcccgtcacaaagagcttcaacaggggagagtgttag

SEQ ID NO: 786 - DNA, 711 bp, Artificial Sequence
  Synthetic
atggacatgagggtgcccgctcagctcctggggctcctgctgctgtggctgagaggtgcgcgctgtgacatccagatgacccagtctccatcttccctgtctgcatctgtaggagacagagtcaccatcacttgccgggcaagtcagagcattagcagcaatttaaattggtatcagcagaaaccagggaaagcccctaagctcctgatctctgctgcatccaatttgcaaagtggggtcccatcaaggttcagtggcagtgaatctgggacagatttcactctcaccatcagcagtctacaatctgaagattttgcaacttactactgtcaacagagtgacagtctcccgctcactttcggcggagggaccaaggtggagatcaagcgaacggtggctgcaccatctgtcttcatcttcccgccatctgatgagcagttgaaatctggaactgcctctgttgtgtgcctgctgaataacttctatcccagagaggccaaagtacagtggaaggtggataacgccctccaatcgggtaactcccaggagagtgtcacagagcaggacagcaaggacagcacctacagcctcagcagcaccctgacgctgagcaaagcagactacgagaaacacaaagtctacgcctgcgaagtcacccatcagggcctgagctcgcccgtcacaaagagcttcaacaggggagagtgttag

SEQ ID NO: 787 - DNA, 711 bp, Artificial Sequence
  Synthetic
atggacatgagggtgcccgctcagctcctggggctcctgctgctgtggctgagaggtgcgcgctgtgacatccagatgacccagtctccatcctccctgtctgcatctgtaggagacagagtcaccatcacttgccaggcgagtcaggacattaacaaccatttaaattggtatcagcagaaaccggggaaagcccctaagctcctgatctacggtgcatacactttggaaacaggggtcccatcaaggttcagtggaagtggctctgggacagattttactttcaccatcagcagcctgcagcctgaagatattgctacatattactgtcaacagtatgataagctcccgctcactttcggcggagggaccaaggtggagatcaaacgaacggtggctgcaccatctgtcttcatcttcccgccatctgatgagcagttgaaatctggaactgcctctgttgtgtgcctgctgaataacttctatcccagagaggccaaagtacagtggaaggtggataacgccctccaatcgggtaactcccaggagagtgtcacagagcaggacagcaaggacagcacctacagcctcagcagcaccctgacgctgagcaaagcagactacgagaaacacaaagtctacgcctgcgaagtcacccatcagggcctgagctcgcccgtcacaaagagcttcaacaggggagagtgttag

SEQ ID NO: 788 - DNA, 711 bp, Artificial Sequence
  Synthetic
atggacatgagggtgcccgctcagctcctggggctcctgctgctgtggctgagaggtgcgcgctgtgacatccagatgacccagtctccatcctccctgtctgcatctgtaggagacagagtcaccatcacttgccaggcgagtcgggacattagcaagtatttaaattggtatcaacagaaaccagggaaagcccccaaactccagatctacgatgcatccaatttggaaacaggggtcccatcaaggttcagtggaagtggatctgggacagattttactttcaccatcagcagcctgcagcctgaagatattgcaacatattactgtcaacactatgataatatcccgatcacctttggccaggggacaagactggagattaaacgaacggtggctgcaccatctgtcttcatcttcccgccatctgatgagcagttgaaatctggaactgcctctgttgtgtgcctgctgaataacttctatcccagagaggccaaagtacagtggaaggtggataacgccctccaatcgggtaactcccaggagagtgtcacagagcaggacagcaaggacagcacctacagcctcagcagcaccctgacgctgagcaaagcagactacgagaaacacaaagtctacgcctgcgaagtcacccatcagggcctgagctcgcccgtcacaaagagcttcaacaggggagagtgttag

SEQ ID NO: 789 - DNA, 711 bp, Artificial Sequence
  Synthetic
atggacatgagggtgcccgctcagctcctggggctcctgctgctgtggctgagaggtgcgcgctgtgacatccagatgacccagtctccatcctccctgtctgcatctgtaggagacagagtcaccatcacttgccaggcgagtcaggacattagcaaacatttaaattggtatcagcagaaaccagggaaagcccctaagctcctgatctacgatacctccaatttggaaacaggggtcccatcaaggttcagtggaagtggatctgggacagattttactttcaccatcagcagcctgcagcctgaagatattgcaacatataactgtcaacagtatgataagctcccgctcactttcggcggagggaccaaggtggagatcaagcgaacggtggctgcaccatctgtcttcatcttcccgccatctgatgagcagttgaaatctggaactgcctctgttgtgtgcctgctgaataacttctatcccagagaggccaaagtacagtggaaggtggataacgccctccaatcgggtaactcccaggagagtgtcacagagcaggacagcaaggacagcacctacagcctcagcagcaccctgacgctgagcaaagcagactacgagaaacacaaagtctacgcctgcgaagtcacccatcagggcctgagctcgcccgtcacaaagagcttcaacaggggagagtgttag

SEQ ID NO: 790 - DNA, 711 bp, Artificial Sequence
  Synthetic
atggacatgagggtgcccgctcagctcctggggctcctgctgctgtggctgagaggtgcgcgctgtgacacccagatgacccagtctccatcctccctgtctgcatctgaaggagacagagtcaccatcacttgccaggcgagtcaggacattttcaacgatttaaattggtatcaggagaaaccagggaaagcccctaagctcctgatctaccatgcatccaatttggaaacaggggtcccatcaaggttcagtggaagtggatctgggacagattatactttcaccatcagcagcctgcagcctgaagatattgctacatattactgtcaacaatatggaaatctcccgctcactttcggcggagggaccaaggtggagatcaaacgaacggtggctgcaccatctgtcttcatcttcccgccatctgatgagcagttgaaatctggaactgcctctgttgtgtgcctgctgaataacttctatcccagagaggccaaagtacagtggaaggtggataacgccctccaatcgggtaactcccaggagagtgtcacagagcaggacagcaaggacagcacctacagcctcagcagcaccctgacgctgagcaaagcagactacgagaaacacaaagtctacgcctgcgaagtcacccatcagggcctgagctcgcccgtcacaaagagcttcaacaggggagagtgttag

SEQ ID NO: 791 - DNA, 711 bp, Artificial Sequence
  Synthetic
atggacatgagggtgcccgctcagctcctggggctcctgctgctgtggctgagaggtgcgcgctgtgacatccagatgacccagtttccatcttccgtgtctgcatctgtaggagacagagtcaccatcacttgtcgggcgagtcaggggattagcaggtggttagcctggtatcagcagaaacaagggaaagcccctaagctcctgatctatatggtatccagtttgcaaagtggggtcccatcaaggttcagtggcagtggatctgggacagatttcactctcaccatcagcagcctgcagcctgaagattttgcaacttactattgtcagcagtctcacaatttcccgatcaccttcggccaagggacacgactggacattaaacgaacggtggctgcaccatctgtcttcatcttcccgccatctgatgagcagttgaaatctggaactgcctctgttgtgtgcctgctgaataacttctatcccagagaggccaaagtacagtggaaggtggataacgccctccaatcgggtaactcccaggagagtgtcacagagcaggacagcaaggacagcacctacagcctcagcagcaccctgacgctgagcaaagcagactacgagaaacacaaagtctacgcctgcgaagtcacccatcagggcctgagctcgcccgtcacaaagagcttcaacaggggagagtgttag

SEQ ID NO: 792 - DNA, 711 bp, Artificial Sequence; identical to SEQ ID NO: 779
  Synthetic

SEQ ID NO: 793 - DNA, 714 bp, Artificial Sequence; identical to SEQ ID NO: 781
  Synthetic

SEQ ID NO: 794 - DNA, 711 bp, Artificial Sequence; identical to SEQ ID NO: 784
  Synthetic

SEQ ID NO: 795 - DNA, 711 bp, Artificial Sequence; identical to SEQ ID NO: 785
  Synthetic

SEQ ID NO: 796 - DNA, 711 bp, Artificial Sequence; identical to SEQ ID NO: 788
  Synthetic

SEQ ID NO: 797 - DNA, 711 bp, Artificial Sequence; identical to SEQ ID NO: 790
  Synthetic

SEQ ID NO: 798 - DNA, 711 bp, Artificial Sequence; identical to SEQ ID NO: 791
  Synthetic

SEQ ID NO: 799 - DNA, 711 bp, Artificial Sequence
  Synthetic
atggacatgagggtgcccgctcagctcctggggctcctgctgctgtggctgagaggtgcgcgctgtgacatccagatgacccagtctccatcctccctgtctgcatctgtaggagacagagtcaccatcacttgccaggcgagtcaggacattaacaaccatttaaattggtatcagcagaaaccagggaaagcccctaagctcctgatctacgatgtatccaatttggaaacaggggtcccatcacgtttcagtggaagtggaagcgggacagattttactttcaccatcagcagcctgcagcctgaagatatcgcaacatattattgtcaacagtatgataaactcccgctcacttttggcggagggaccaaggtggagatcaagcgcacggtggctgcaccatctgtcttcatcttcccgccatctgatgagcagttgaaatctggaactgcctctgttgtgtgcctgctgaataacttctatcccagagaggccaaagtacagtggaaggtggataacgccctccaatcgggtaactcccaggagagtgtcacagagcaggacagcaaggacagcacctacagcctcagcagcaccctgacgctgagcaaagcagactacgagaaacacaaagtctacgcctgcgaagtcacccatcagggcctgagctcgcccgtcacaaagagcttcaacaggggagagtgttag

SEQ ID NO: 800 - DNA, 711 bp, Artificial Sequence; identical to SEQ ID NO: 799
  Synthetic

SEQ ID NO: 801 - DNA, 711 bp, Artificial Sequence
  Synthetic
atggacatgagggtgcccgctcagctcctggggctcctgctgctgtggctgagaggtgcgcgctgtgacatccagatgacccagtctccatcttccgtgtctgcatctgtaggagacagagtcaccatcacttgtcgggcgagtcaggggattagcaggtggttagcctggtatcagcagaaacaagggaaagcccctaagctcctgatctatatggtatccagtttgcaaagtggggtcccatcaaggttcagtggcagtggatctgggacagatttcactctcaccatcagcagcctgcagcctgaagattttgcaacttactattgtcagcagtctcacaatttcccgatcaccttcggccaagggacacgactggacattaaacgaacggtggctgcaccatctgtcttcatcttcccgccatctgatgagcagttgaaatctggaactgcctctgttgtgtgcctgctgaataacttctatcccagagaggccaaagtacagtggaaggtggataacgccctccaatcgggtaactcccaggagagtgtcacagagcaggacagcaaggacagcacctacagcctcagcagcaccctgacgctgagcaaagcagactacgagaaacacaaagtctacgcctgcgaagtcacccatcagggcctgagctcgcccgtcacaaagagcttcaacaggggagagtgttag

SEQ ID NO: 802 - DNA, 711 bp, Artificial Sequence; identical to SEQ ID NO: 801
  Synthetic

SEQ ID NO: 803 - DNA, 711 bp, Artificial Sequence; identical to SEQ ID NO: 801
  Synthetic

SEQ ID NO: 804 - DNA, 711 bp, Artificial Sequence
  Synthetic
atggacatgagggtgcccgctcagctcctggggctcctgctgctgtggctgagaggtgcgcgctgtgacatccagatgacccagtctccatcttccgtgtctgcatctgtaggagacagagtcaccatcacttgtcgggcgagtcaggggattagcaggtggttagcctggtatcagcagaaacctgggaaagcccctaagctcctgatctatatggtatccagtttgcaaagtggggtcccatcaaggttcagtggcagtggatctgggacagatttcactctcaccatcagcagcctgcagcctgaagattttgcaacttactattgtcagcagtctcacaatttcccgatcaccttcggccaagggacacgactggacattaaacgaacggtggctgcaccatctgtcttcatcttcccgccatctgatgagcagttgaaatctggaactgcctctgttgtgtgcctgctgaataacttctatcccagagaggccaaagtacagtggaaggtggataacgccctccaatcgggtaactcccaggagagtgtcacagagcaggacagcaaggacagcacctacagcctcagcagcaccctgacgctgagcaaagcagactacgagaaacacaaagtctacgcctgcgaagtcacccatcagggcctgagctcgcccgtcacaaagagcttcaacaggggagagtgttag

SEQ ID NO: 805 - DNA, 711 bp, Artificial Sequence; identical to SEQ ID NO: 801
  Synthetic

SEQ ID NO: 806 - DNA, 711 bp, Artificial Sequence
  Synthetic
atggacatgagggtgcccgctcagctcctggggctcctgctgctgtggctgagaggtgcgcgctgtgacacccagatgacccagtctccatcctccctgtctgcatctgttggagacagagtcaccatcacttgccaggcgagtcaggacattttcaacgatttaaattggtatcaggagaaaccagggaaagcccctaagctcctgatctaccatgcatccaatttggaaacaggggtcccatcaaggttcagtggaagtggatctgggacagattttactttcaccatcagcagcctgcagcctgaagatattgctacatattactgtcaacaatatggaaatctcccgctcactttcggcggagggaccaaggtggagatcaaacgaacggtggctgcaccatctgtcttcatcttcccgccatctgatgagcagttgaaatctggaactgcctctgttgtgtgcctgctgaataacttctatcccagagaggccaaagtacagtggaaggtggataacgccctccaatcgggtaactcccaggagagtgtcacagagcaggacagcaaggacagcacctacagcctcagcagcaccctgacgctgagcaaagcagactacgagaaacacaaagtctacgcctgcgaagtcacccatcagggcctgagctcgcccgtcacaaagagcttcaacaggggagagtgttag

SEQ ID NO: 807 - DNA, 711 bp, Artificial Sequence
  Synthetic
atggacatgagggtgcccgctcagctcctggggctcctgctgctgtggctgagaggtgcgcgctgtgacacccagatgacccagtctccatcctccctgtctgcatctgttggagacagagtcaccatcacttgccaggcgagtcaggacattttcaacgatttaaattggtatcagcaaaaaccagggaaagcccctaagctcctgatctaccatgcatccaatttggaaacaggggtcccatcaaggttcagtggaagtggatctgggacagattatactttcaccatcagcagcctgcagcctgaagatattgctacatattactgtcaacaatatggaaatctcccgctcactttcggcggagggaccaaggtggagatcaaacgaacggtggctgcaccatctgtcttcatcttcccgccatctgatgagcagttgaaatctggaactgcctctgttgtgtgcctgctgaataacttctatcccagagaggccaaagtacagtggaaggtggataacgccctccaatcgggtaactcccaggagagtgtcacagagcaggacagcaaggacagcacctacagcctcagcagcaccctgacgctgagcaaagcagactacgagaaacacaaagtctacgcctgcgaagtcacccatcagggcctgagctcgcccgtcacaaagagcttcaacaggggagagtgttag

SEQ ID NO: 808 - DNA, 711 bp, Artificial Sequence
  Synthetic
atggacatgagggtgcccgctcagctcctggggctcctgctgctgtggctgagaggtgcgcgctgtgacacccagatgacccagtctccatcctccctgtctgcatctgttggagacagagtcaccatcacttgccaggcgagtcaggacattttcaacgatttaaattggtatcaggagaaaccagggaaagcccctaagctcctgatctaccatgcatccaatttggaaacaggggtcccatcaaggttcagtggaagtggatctgggacagattatactttcaccatcagcagcctgcagcctgaagatattgctacatattactgtcaacaatatggaaatctcccgctcactttcggcggagggaccaaggtggagatcaaacgaacggtggctgcaccatctgtcttcatcttcccgccatctgatgagcagttgaaatctggaactgcctctgttgtgtgcctgctgaataacttctatcccagagaggccaaagtacagtggaaggtggataacgccctccaatcgggtaactcccaggagagtgtcacagagcaggacagcaaggacagcacctacagcctcagcagcaccctgacgctgagcaaagcagactacgagaaacacaaagtctacgcctgcgaagtcacccatcagggcctgagctcgcccgtcacaaagagcttcaacaggggagagtgttag

SEQ ID NO: 809 - DNA, 711 bp, Artificial Sequence
  Synthetic
atggacatgagggtgcccgctcagctcctggggctcctgctgctgtggctgagaggtgcgcgctgtgacatccagatgacccagtctccatcctccctgtctgcatctgtaggagacagagtcaccatcacttgccaggcgagtcgggacattagcaagtatttaaattggtatcaacagaaaccagggaaagcccccaaactccttatctacgatgcatccaatttggaaacaggggtcccatcaaggttcagtggaagtggatctgggacagattttactttcaccatcagcagcctgcagcctgaagattttgcaacatattactgtcaacactatgataatatcccgatcacctttggccaggggacaagactggagattaaacgaacggtggctgcaccatctgtcttcatcttcccgccatctgatgagcagttgaaatctggaactgcctctgttgtgtgcctgctgaataacttctatcccagagaggccaaagtacagtggaaggtggataacgccctccaatcgggtaactcccaggagagtgtcacagagcaggacagcaaggacagcacctacagcctcagcagcaccctgacgctgagcaaagcagactacgagaaacacaaagtctacgcctgcgaagtcacccatcagggcctgagctcgcccgtcacaaagagcttcaacaggggagagtgttag

SEQ ID NO: 810 - DNA, 711 bp, Artificial Sequence
  Synthetic
atggacatgagggtgcccgctcagctcctggggctcctgctgctgtggctgagaggtgcgcgctgtgacatccagatgacccagtctccatcctccctgtctgcatctgtaggagacagagtcaccatcacttgccaggcgagtcgggacattagcaagtatttaaattggtatcaacagaaaccagggaaagcccccaaactccttatctacgatgcatccaatttggaaacaggggtcccatcaaggttcagtggaagtggatctgggacagattttactttcaccatcagcagcctgcagcctgaagatattgcaacatattactgtcaacactatgataatatcccgatcacctttggccaggggacaagactggagattaaacgaacggtggctgcaccatctgtcttcatcttcccgccatctgatgagcagttgaaatctggaactgcctctgttgtgtgcctgctgaataacttctatcccagagaggccaaagtacagtggaaggtggataacgccctccaatcgggtaactcccaggagagtgtcacagagcaggacagcaaggacagcacctacagcctcagcagcaccctgacgctgagcaaagcagactacgagaaacacaaagtctacgcctgcgaagtcacccatcagggcctgagctcgcccgtcacaaagagcttcaacaggggagagtgttag

SEQ ID NO: 811 - DNA, 711 bp, Artificial Sequence; identical to SEQ ID NO: 809
  Synthetic

SEQ ID NO: 812 - DNA, 711 bp, Artificial Sequence; identical to SEQ ID NO: 810
  Synthetic

SEQ ID NO: 813 - DNA, 711 bp, Artificial Sequence; identical to SEQ ID NO: 809
  Synthetic

SEQ ID NO: 814 - DNA, 711 bp, Artificial Sequence; identical to SEQ ID NO: 809
  Synthetic

SEQ ID NO: 815 - DNA, 711 bp, Artificial Sequence; identical to SEQ ID NO: 809
  Synthetic

SEQ ID NO: 816 - DNA, 711 bp, Artificial Sequence; identical to SEQ ID NO: 810
  Synthetic

SEQ ID NO: 817 - DNA, 711 bp, Artificial Sequence; identical to SEQ ID NO: 784
  Synthetic

SEQ ID NO: 818 - DNA, 711 bp, Artificial Sequence; identical to SEQ ID NO: 784
  Synthetic

SEQ ID NO: 819 - DNA, 711 bp, Artificial Sequence; identical to SEQ ID NO: 784
  Synthetic

SEQ ID NO: 820 - DNA, 711 bp, Artificial Sequence
  Synthetic
atggacatgagggtgcccgctcagctcctggggctcctgctgctgtggctgagaggtgcgcgctgtgacatccagatgacccagtctccatcctccctgtctgcatctgtaggagacagagtcaccatcacttgccaggcgagtcaggacattaggaaacatttaaattggtatcagcagaaaccagggaaagcccctaaactcctgatctacgatgcagccaatttggaaacaggggtcccatcaaggttcagtggaagtggttctgggacagattttactttcaccatcagcagcctgcagcctgaagattttgcaacatattactgtcaacactatgctaatctcccgatcaccttcggccaagggacacgactggagattaaacgaacggtggctgcaccatctgtcttcatcttcccgccatctgatgagcagttgaaatctggaactgcctctgttgtgtgcctgctgaataacttctatcccagagaggccaaagtacagtggaaggtggataacgccctccaatcgggtaactcccaggagagtgtcacagagcaggacagcaaggacagcacctacagcctcagcagcaccctgacgctgagcaaagcagactacgagaaacacaaagtctacgcctgcgaagtcacccatcagggcctgagctcgcccgtcacaaagagcttcaacaggggagagtgttag

SEQ ID NO: 821 - DNA, 711 bp, Artificial Sequence; identical to SEQ ID NO: 779
  Synthetic

SEQ ID NO: 822 - DNA, 711 bp, Artificial Sequence; identical to SEQ ID NO: 820
  Synthetic

SEQ ID NO: 823 - DNA, 711 bp, Artificial Sequence; identical to SEQ ID NO: 779
  Synthetic

SEQ ID NO: 824 - DNA, 711 bp, Artificial Sequence; identical to SEQ ID NO: 820
  Synthetic

SEQ ID NO: 825 - DNA, 711 bp, Artificial Sequence; identical to SEQ ID NO: 820
  Synthetic

SEQ ID NO: 826 - DNA, 711 bp, Artificial Sequence; identical to SEQ ID NO: 820
  Synthetic

SEQ ID NO: 827 - DNA, 711 bp, Artificial Sequence
  Synthetic
atggacatgagggtgcccgctcagctcctggggctcctgctgctgtggctgagaggtgcgcgctgtgacatccagatgacccagtctccatcctccctgtctgcatctgtaggagacagagtcaccatcacttgccaggcgagtcaggacattaggaaacatttaaattggtatcagcagaaaccagggaaagcccctaaactcctgatctacgatgcagccaatttggaaacaggggtcccatcaaggttcagtggaagtggttctgggacagattttactcttaccatcagcagcctgcagcctgaagattttgcaacatattactgtcaacactatgctaatctcccgatcaccttcggccaagggacacgactggagattaaacgaacggtggctgcaccatctgtcttcatcttcccgccatctgatgagcagttgaaatctggaactgcctctgttgtgtgcctgctgaataacttctatcccagagaggccaaagtacagtggaaggtggataacgccctccaatcgggtaactcccaggagagtgtcacagagcaggacagcaaggacagcacctacagcctcagcagcaccctgacgctgagcaaagcagactacgagaaacacaaagtctacgcctgcgaagtcacccatcagggcctgagctcgcccgtcacaaagagcttcaacaggggagagtgttag

SEQ ID NO: 828 - DNA, 711 bp, Artificial Sequence; identical to SEQ ID NO: 779
  Synthetic

SEQ ID NO: 829 - DNA, 711 bp, Artificial Sequence; identical to SEQ ID NO: 779
  Synthetic

SEQ ID NO: 830 - DNA, 711 bp, Artificial Sequence; identical to SEQ ID NO: 820
  Synthetic

SEQ ID NO: 831 - DNA, 693 bp, Artificial Sequence
  Synthetic
atggcctgggctctgctgctcctcaccctcctcactcagggcacagggtcctgggcctcctatgagctgactcagccaccctcagtgtccgtgtccccaggacagacagccagcatcacctgctctggagataaattgggggagagacaagttagctggtatcagcaaaagccaggccagtcccctgttctggtcatctatcaagataacaagcggccctcagggatccctgagcgattctctggctccaagtctgggaacacagccactctgaccatcagcgggacccaggcaatggatgaggctgactattactgtcaggcgtgggacagaaatgtggtattcggcggagggaccaagctgaccgtcctaggtcagcccaaggctgcaccctcggtcactctgttcccgccctcctctgaggagcttcaagccaacaaggccacactggtgtgtctcatcagtgacttctacccgggagccgtgacagtggcctggaaggcagatagcagccccgtcaaggcgggagtggaaaccaccacaccctccaaacaaagcaacaacaagtacgcggccagcagctatctgagcctgacgcctgagcagtggaagtcccacagaagctacagctgccaggtcacgcatgaagggagcaccgtggagaagacagtggcccctacagaatgttcatag

SEQ ID NO: 832 - DNA, 693 bp, Artificial Sequence
  Synthetic
atggcctgggctctgctgctcctcaccctcctcactcagggcacagggtcctgggcctcctatgagctgactcagccaccctcagtgtccgtgtccccaggacagacagccagcatcacctgctctggagataaattgggggagagacaagttagctggtatcagttgaagccaggccagtcccctgttctggtcatctatcaagataacaagcggccctcagggatccctgagcgattctctggctccaagtctgggaacacagccactctgaccatcagcgggacccaggcaatggatgaggctgactattactgtcaggcgtgggacagaaatgtggtattcggcggagggaccaagctgaccgtcctaggtcagcccaaggctgcaccctcggtcactctgttcccgccctcctctgaggagcttcaagccaacaaggccacactggtgtgtctcatcagtgacttctacccgggagccgtgacagtggcctggaaggcagatagcagccccgtcaaggcgggagtggaaaccaccacaccctccaaacaaagcaacaacaagtacgcggccagcagctatctgagcctgacgcctgagcagtggaagtcccacagaagctacagctgccaggtcacgcatgaagggagcaccgtggagaagacagtggcccctacagaatgttcatag

SEQ ID NO: 833 - DNA, 693 bp, Artificial Sequence
  Synthetic
atggcctgggctctgctgctcctcaccctcctcactcagggcacagggtcctgggcctcctatgagctgactcagccaccctcagtgtccgtgtccccaggacagacagccagcatcacctgctctggagataaattgggggagagaaatgttggttggtatcagcaaaagccaggccagtcccctgttctggtcatctatcaagataacaagcggccctcagggatccctgagcgattctctggctccaagtctgggaacacagccactctgaccatcagcgggacccaggcaatggatgaggctgactattactgtcaggcgtgggacagaaatgtggtattcggcggagggaccaagctgaccgtcctaggtcagcccaaggctgcaccctcggtcactctgttcccgccctcctctgaggagcttcaagccaacaaggccacactggtgtgtctcatcagtgacttctacccgggagccgtgacagtggcctggaaggcagatagcagccccgtcaaggcgggagtggaaaccaccacaccctccaaacaaagcaacaacaagtacgcggccagcagctatctgagcctgacgcctgagcagtggaagtcccacagaagctacagctgccaggtcacgcatgaagggagcaccgtggagaagacagtggcccctacagaatgttcatag

SEQ ID NO: 834 - DNA, 693 bp, Artificial Sequence
  Synthetic
atggcctgggctctgctgctcctcaccctcctcactcagggcacagggtcctgggcctcctatgagctgactcagccaccctcagtgtccgtgtccccaggacagacagccagcatcacctgctctggagataaattgggggagagaaatgttgcttggtatcagcaaaagccaggccagtcccctgttctggtcatctatcaagataacaagcggccctcagggatccctgagcgattctctggctccaagtctgggaacacagccactctgaccatcagcgggacccaggcaatggatgaggctgactattactgtcaggcgtgggacagaaatgtggtattcggcggagggaccaagctgaccgtcctaggtcagcccaaggctgcaccctcggtcactctgttcccgccctcctctgaggagcttcaagccaacaaggccacactggtgtgtctcatcagtgacttctacccgggagccgtgacagtggcctggaaggcagatagcagccccgtcaaggcgggagtggaaaccaccacaccctccaaacaaagcaacaacaagtacgcggccagcagctatctgagcctgacgcctgagcagtggaagtcccacagaagctacagctgccaggtcacgcatgaagggagcaccgtggagaagacagtggcccctacagaatgttcatag

SEQ ID NO: 835 - DNA, 693 bp, Artificial Sequence; identical to SEQ ID NO: 832
  Synthetic

SEQ ID NO: 836 - DNA, 714 bp, Artificial Sequence
  Synthetic
atggacatgagggtgcccgctcagctcctggggctcctgctgctgtggctgagaggtgcgcgctgtgaaatcgtgatgacgcagtctccagccactctgtctgtgtctccaggggaaagagccaccctctcctgcagggccagtcagagtgttagcagcaacttagcctggtaccagcagaaacctggccaggctcccaggctcctcatctatggtgcatccaccagggccacgggtattccagccaggttcagtggctctgggtctgggacagacttcactctcaccatcagcagcctgcagcctgaagattttgcagtttattactgtcagcacttcaagacctggcctccgctcactttcggcggagggaccaaggtggagatcaaacgaacggtggctgcaccatctgtcttcatcttcccgccatctgatgagcagttgaaatctggaactgcctctgttgtgtgcctgctgaataacttctatcccagagaggccaaagtacagtggaaggtggataacgccctccaatcgggtaactcccaggagagtgtcacagagcaggacagcaaggacagcacctacagcctcagcagcaccctgacgctgagcaaagcagactacgagaaacacaaagtctacgcctgcgaagtcacccatcagggcctgagctcgcccgtcacaaagagcttcaacaggggagagtgttag

SEQ ID NO: 837 - DNA, 714 bp, Artificial Sequence
  Synthetic
atggacatgagggtgcccgctcagctcctggggctcctgctgctgtggctgagaggtgcgcgctgtgaaatcgtgatgacgcagtctccagccactctgtctgtgtctccaggggaaagagccaccctctcctgcagggccagtcagagtgttagcagcaacttagcctggtaccagcagaaacctggccaggctcccaggctcctcatctatggtgcatccaccagggccacgggtattccagccaggttcagtggctctgggtctgggacagacttcactctcaccatcagcagcctgcagtctgaagattttgcagtttattactgtcagcacttcaagacctatcctccgctcactttcggcggagggaccaaggtggagatcaaacgaacggtggctgcaccatctgtcttcatcttcccgccatctgatgagcagttgaaatctggaactgcctctgttgtgtgcctgctgaataacttctatcccagagaggccaaagtacagtggaaggtggataacgccctccaatcgggtaactcccaggagagtgtcacagagcaggacagcaaggacagcacctacagcctcagcagcaccctgacgctgagcaaagcagactacgagaaacacaaagtctacgcctgcgaagtcacccatcagggcctgagctcgcccgtcacaaagagcttcaacaggggagagtgttag

SEQ ID NO: 838 - DNA, 714 bp, Artificial Sequence
  Synthetic
atggacatgagggtgcccgctcagctcctggggctcctgctgctgtggctgagaggtgcgcgctgtgaaatcgtgatgacgcagtctccagccactctgtctgtgtctccaggggaaagagccaccctctcctgcagggccagtcagagtgttagcagcaacttagcctggtaccagcagaaacctggccaggctcccaggctcctcatctatggtgcatccaccagggccacgggtattccagccaggttcagtggctctgggtctgggacagacttcactctcaccatcagcagcctgcagtctgaagattttgcagtttattactgtcagcacttcaagacctttcctccgctcactttcggcggagggaccaaggtggagatcaaacgaacggtggctgcaccatctgtcttcatcttcccgccatctgatgagcagttgaaatctggaactgcctctgttgtgtgcctgctgaataacttctatcccagagaggccaaagtacagtggaaggtggataacgccctccaatcgggtaactcccaggagagtgtcacagagcaggacagcaaggacagcacctacagcctcagcagcaccctgacgctgagcaaagcagactacgagaaacacaaagtctacgcctgcgaagtcacccatcagggcctgagctcgcccgtcacaaagagcttcaacaggggagagtgttag

SEQ ID NO: 839 - DNA, 714 bp, Artificial Sequence
  Synthetic
atggacatgagggtgcccgctcagctcctggggctcctgctgctgtggctgagaggtgcgcgctgtgaaatcgtgatgacgcagtctccagccactctgtctgtgtctccaggggaaagagccaccctctcctgcagggccagtcagagtgttagcagcaacttagcctggtaccagcagaaacctggccaggctcccaggctcctcatctatggtgcatccaccagggccacgggtattccagccaggttcagtggctctgggtctgggacagacttcactctcaccatcagcagcctgcagtctgaagattttgcagtttattactgtcagcacttcaagacccatcctccgctcactttcggcggagggaccaaggtggagatcaaacgaacggtggctgcaccatctgtcttcatcttcccgccatctgatgagcagttgaaatctggaactgcctctgttgtgtgcctgctgaataacttctatcccagagaggccaaagtacagtggaaggtggataacgccctccaatcgggtaactcccaggagagtgtcacagagcaggacagcaaggacagcacctacagcctcagcagcaccctgacgctgagcaaagcagactacgagaaacacaaagtctacgcctgcgaagtcacccatcagggcctgagctcgcccgtcacaaagagcttcaacaggggagagtgttag

SEQ ID NO: 840 - DNA, 714 bp, Artificial Sequence
  Synthetic
atggacatgagggtgcccgctcagctcctggggctcctgctgctgtggctgagaggtgcgcgctgtgaaatcgtgatgacgcagtctccagccactctgtctgtgtctccaggggaaagagccaccctctcctgcagggccagtcagagtgttagcagcaacttagcctggtaccagcagaaacctggccaggctcccaggctcctcatctatggtgcatccaccagggccacgggtattccagccaggttcagtggctctgggtctgggacagacttcactctcaccatcagcagcctgcagcctgaagattttgcagtttattactgtcagcacttcaagacctatcctccgctcactttcggcggagggaccaaggtggagatcaaacgaacggtggctgcaccatctgtcttcatcttcccgccatctgatgagcagttgaaatctggaactgcctctgttgtgtgcctgctgaataacttctatcccagagaggccaaagtacagtggaaggtggataacgccctccaatcgggtaactcccaggagagtgtcacagagcaggacagcaaggacagcacctacagcctcagcagcaccctgacgctgagcaaagcagactacgagaaacacaaagtctacgcctgcgaagtcacccatcagggcctgagctcgcccgtcacaaagagcttcaacaggggagagtgttag

SEQ ID NO: 841 - protein, 14 aa, Artificial Sequence
  Synthetic
TSGSGTYYADSVKG

SEQ ID NO: 842 - protein, 10 aa, Artificial Sequence
  Synthetic
VAGSNFLFDY

SEQ ID NO: 843 - protein, 13 aa, Artificial Sequence
  Synthetic
GGYTSSWRWYFDL

SEQ ID NO: 844 - protein, 14 aa, Artificial Sequence
  Synthetic
GGYTSSWSRWYFDL

SEQ ID NO: 845 - protein, 8 aa, Artificial Sequence
  Synthetic
DYGDSFDY

What is claimed is:

1. A method of treating cardiovascular disease comprising administering to a subject in need thereof a therapeutically effective amount of an antigen binding protein that binds to TrigGering Receptor Expressed on Myeloid cells 1 (TREM-1);
the antigen binding protein comprising
a. a light chain variable domain comprising:
i. a light chain CDR1 comprising an amino acid sequence selected from SEQ ID NOS: 10, 30, 50, 70, 90, 110, 130, 150, 170, 190, 210, 230, 250, 270, and 544;
ii. a light chain CDR2 comprising an amino acid sequence selected from SEQ ID NOS: 11, 31, 51, 71, 91, 111, 131, 151, 171, 191, 211, 231, 251, 271, and 545;
iii. a light chain CDR3 comprising an amino acid sequence selected from SEQ ID NOS: 12, 32, 52, 72, 92, 112, 132, 152, 172, 192, 212, 232, 252, 272, and 546; and
b. a heavy chain variable domain comprising:
i. a heavy chain CDR1 comprising an amino acid sequence selected from SEQ ID NOS: 16, 36, 56, 76, 96, 116, 136, 156, 176, 196, 216, 236, 256, 276, and 550;
ii. a heavy chain CDR2 comprising an amino acid sequence selected from SEQ ID NOS: 17, 37, 57, 77, 97, 117, 137, 157, 177, 197, 217, 237, 257, 277, 297 and 551; and
iii. a heavy chain CDR3 comprising an amino acid sequence selected from SEQ ID NOS: 18, 38, 58, 78, 98, 118, 138, 158, 178, 198, 218, 238, 258, 278, 298 and 552.

2. The method of claim 1, wherein the antigen binding protein comprises:
a. the light chain CDR1 sequence set out in SEQ ID NO: 10, 30, 50, 90, 130, 150, or 270;
b. the light chain CDR2 sequence set out in SEQ ID NOS: 11, 31, 51, 91, 131, 151, or 271;
c. the light chain CDR3 sequence set out in SEQ ID NO 12, 32, 52, 92, 132, 152, or 272;
d. the heavy chain CDR1 sequence set out in SEQ ID NO: 16, 36, 56, 96, 136, 156, and 276;
e. the heavy chain CDR2 sequence set out in SEQ ID NO: 17, 37, 57, 97, 137, 157, and 277; and
f. the heavy chain CDR3 sequence set out in SEQ ID NO: 18, 38, 58, 98, 138, and 278.

3. The method of claim 1 or 2, wherein the antigen binding protein comprises:
a. the light chain CDR1 sequence set out in SEQ ID NO: 30 or 90;
b. the light chain CDR2 sequence set out in SEQ ID NO: 31 or 91;
c. the light chain CDR3 sequence set out in SEQ ID NO: 32 or 92;
d. the heavy chain CDR1 sequence set out in SEQ ID NO: 36 or 96;
e. the heavy chain CDR2 sequence set out in SEQ ID NO: 37 or 97; and
f. the heavy chain CDR3 sequence set out in SEQ ID NOS: 38 or 98

4. The method of any one of claims 1 to 3 wherein the antigen-binding protein comprises:
i) SEQ ID NO: 10 (LCDR1), SEQ ID NO: 11 (LCDR2), SEQ ID NO: 12 (LCDR3), SEQ ID NO: 16 (HCDR1), SEQ ID NO: 17 (HCDR2) and SEQ ID NO: 18 (HCDR3);
ii) SEQ ID NO: 30 (LCDR1), SEQ ID NO: 31 (LCDR2), SEQ ID NO: 32 (LCDR3), SEQ ID NO: 36 (HCDR1), SEQ ID NO: 37 (HCDR2) and SEQ ID NO: 38 (HCDR3);
iii) SEQ ID NO: 50 (LCDR1), SEQ ID NO: 51 (LCDR2), SEQ ID NO: 52 (LCDR3), SEQ ID NO: 56 (HCDR1), SEQ ID NO: 57 (HCDR2) and SEQ ID NO: 58 (HCDR3);
iv) SEQ ID NO: 70 (LCDR1), SEQ ID NO: 71 (LCDR2), SEQ ID NO: 72 (LCDR3), SEQ ID NO: 76 (HCDR1), SEQ ID NO: 77 (HCDR2) and SEQ ID NO: 78 (HCDR3);
v) SEQ ID NO: 90 (LCDR1), SEQ ID NO: 91 (LCDR2), SEQ ID NO: 92 (LCDR3), SEQ ID NO: 96 (HCDR1), SEQ ID NO: 97 (HCDR2) and SEQ ID NO: 98 (HCDR3);
vi) SEQ ID NO: 110 (LCDR1), SEQ ID NO: 111 (LCDR2), SEQ ID NO: 112 (LCDR3), SEQ ID NO: 116 (HCDR1), SEQ ID NO: 117 (HCDR2) and SEQ ID NO: 118 (HCDR3);
vii) SEQ ID NO: 130 (LCDR1), SEQ ID NO: 131 (LCDR2), SEQ ID NO: 132 (LCDR3), SEQ ID NO: 136 (HCDR1), SEQ ID NO: 137 (HCDR2) and SEQ ID NO: 138 (HCDR3);
viii) SEQ ID NO: 150 (LCDR1), SEQ ID NO: 151 (LCDR2), SEQ ID NO: 152 (LCDR3), SEQ ID NO: 156 (HCDR1), SEQ ID NO: 157 (HCDR2) and SEQ ID NO: 158 (HCDR3);
ix) SEQ ID NO: 170 (LCDR1), SEQ ID NO: 171 (LCDR2), SEQ ID NO: 172 (LCDR3), SEQ ID NO: 176 (HCDR1), SEQ ID NO: 177 (HCDR2) and SEQ ID NO: 178 (HCDR3);
x) SEQ ID NO: 190 (LCDR1), SEQ ID NO: 191 (LCDR2), SEQ ID NO: 192 (LCDR3), SEQ ID NO: 196 (HCDR1), SEQ ID NO: 197 (HCDR2) and SEQ ID NO: 198 (HCDR3);
xi) SEQ ID NO: 210 (LCDR1), SEQ ID NO: 211 (LCDR2), SEQ ID NO: 212 (LCDR3), SEQ ID NO: 216 (HCDR1), SEQ ID NO: 217 (HCDR2) and SEQ ID NO: 218 (HCDR3);
xii) SEQ ID NO: 230 (LCDR1), SEQ ID NO: 231 (LCDR2), SEQ ID NO: 232 (LCDR3), SEQ ID NO: 236 (HCDR1), SEQ ID NO: 237 (HCDR2) and SEQ ID NO: 238 (HCDR3);
xiii) SEQ ID NO: 250 (LCDR1), SEQ ID NO: 251 (LCDR2), SEQ ID NO: 252 (LCDR3), SEQ ID NO: 256 (HCDR1), SEQ ID NO: 257 (HCDR2) and SEQ ID NO: 258 (HCDR3);
xiv) SEQ ID NO: 270 (LCDR1), SEQ ID NO: 271 (LCDR2), SEQ ID NO: 272 (LCDR3), SEQ ID NO: 276 (HCDR1), SEQ ID NO: 277 (HCDR2) and SEQ ID NO: 278 (HCDR3); or
xv) SEQ ID NO: 544 (LCDR1), SEQ ID NO: 545 (LCDR2), SEQ ID NO: 546 (LCDR3), SEQ ID NO: 550 (HCDR1), SEQ ID NO: 551 (HCDR2) and SEQ ID NO: 552 (HCDR3).

5. The method of any one of claims 1 to 4, wherein the antigen-binding protein comprises a set of CDR selected from:
i) SEQ ID NO: 10 (LCDR1), SEQ ID NO: 11 (LCDR2), SEQ ID NO: 12 (LCDR3), SEQ ID NO: 16 (HCDR1), SEQ ID NO: 17 (HCDR2) and SEQ ID NO: 18 (HCDR3);
ii) SEQ ID NO: 30 (LCDR1), SEQ ID NO: 31 (LCDR2), SEQ ID NO: 32 (LCDR3), SEQ ID NO: 36 (HCDR1), SEQ ID NO: 37 (HCDR2) and SEQ ID NO: 38 (HCDR3);
iii) SEQ ID NO: 50 (LCDR1), SEQ ID NO: 51 (LCDR2), SEQ ID NO: 52 (LCDR3), SEQ ID NO: 56 (HCDR1), SEQ ID NO: 57 (HCDR2) and SEQ ID NO: 58 (HCDR3);
iv) SEQ ID NO: 90 (LCDR1), SEQ ID NO: 91 (LCDR2), SEQ ID NO: 92 (LCDR3), SEQ ID NO: 96 (HCDR1), SEQ ID NO: 97 (HCDR2) and SEQ ID NO: 98 (HCDR3);
v) SEQ ID NO: 130 (LCDR1), SEQ ID NO: 131 (LCDR2), SEQ ID NO: 132 (LCDR3), SEQ ID NO: 136 (HCDR1), SEQ ID NO: 137 (HCDR2) and SEQ ID NO: 138 (HCDR3);
vi) SEQ ID NO: 150 (LCDR1), SEQ ID NO: 151 (LCDR2), SEQ ID NO: 152 (LCDR3), SEQ ID NO: 156 (HCDR1), SEQ ID NO: 157 (HCDR2) and SEQ ID NO: 158 (HCDR3); or
vii) SEQ ID NO: 270 (LCDR1), SEQ ID NO: 271 (LCDR2), SEQ ID NO: 272 (LCDR3), SEQ ID NO: 276 (HCDR1), SEQ ID NO: 277 (HCDR2) and SEQ ID NO: 278 (HCDR3).

6. The method any one of claims 1 to 5 wherein of antigen-binding protein comprises:
a. a light chain comprising the amino acid sequences SEQ ID NO: 30 (LCDR1), SEQ ID NO: 31 (LCDR2), SEQ ID NO: 32 (LCDR3), and a heavy chain comprising the amino acid sequences SEQ ID NO: 36 (HCDR1), SEQ ID NO: 37 (HCDR2) and SEQ ID NO: 38 (HCDR3); or
b. a light chain comprising the amino acid sequences SEQ ID NO: 90 (LCDR1), SEQ ID NO: 91 (LCDR2), SEQ ID NO: 92 (LCDR3), and a heavy chain comprising the amino acid sequences SEQ ID NO: 96 (HCDR1), SEQ ID NO: 97 (HCDR2) and SEQ ID NO: 98 (HCDR3).

7. The method of any one of claims 1 to 6, wherein the antigen-binding protein comprises:
a. a light chain variable domain comprising an amino acid sequence selected from the group consisting of:
i. a sequence at least 80% identical to an amino acid sequence selected from SEQ ID NOS: 21, 41, 61, 81, 101, 121, 141, 161, 181, 201, 221, 241, 261, 281 and 539;
ii. a sequence encoded by a polynucleotide sequence that is at least 80% identical to an amino acid sequence selected from SEQ ID NOS: 21, 41, 61, 81, 101, 121, 141,161, 181, 201, 221, 241, 261, 281 and 539; or
iii. a sequence encoded by a polynucleotide that hybridizes under moderately stringent conditions to the complement of a polynucleotide consisting of a nucleic acid sequence selected from SEQ ID NOS: 19, 39, 59, 79, 99, 119, 139, 159, 179, 199, 219, 239, 259, 279 and 537; and
b. a heavy chain variable domain comprising an amino acid sequence selected from the group consisting of:
i. a sequence that is at least 80% identical to an amino acid sequence selected from SEQ ID NOS: 22, 42, 62, 82, 102, 122, 142, 162, 182, 202, 222, 242, 262, 282, and 540;
ii. a sequence encoded by a polynucleotide sequence that is at least 80% identical to an amino acid sequence selected from SEQ ID NOS: 22, 42, 62, 82, 102, 122, 142, 162, 182, 202, 222, 242, 262, 282, and 540; or
iii. a sequence encoded by a polynucleotide that hybridizes under moderately stringent conditions to the complement of a polynucleotide consisting of a nucleic sequence selected from SEQ ID NOS: 20, 40, 60, 80, 100, 120, 140, 160, 180, 200, 220, 240, 260, 280, and 2184.

8. The method of any one of claims 1 to 7, wherein the antigen-binding protein comprises an amino acid sequence at least 90% identical to a heavy chain variable region amino acid sequence selected from the group consisting of SEQ ID NOS: 22, 42, 62, 82, 102, 122, 142, 162, 182, 202, 222, 242, 262, 282, and 540.

9. The method of any one of claims 1 to 8, wherein the antigen binding protein comprises an amino acid sequence at least 90% identical to a heavy chain variable region amino acid sequence selected from the group consisting of SEQ ID NOs: 22, 42, 62, 102, 142, 162, and 282.

10. The method of any one of claims 1 to 9, wherein the antigen binding protein comprises an amino acid sequence at least 90% identical to a heavy chain variable region amino acid sequence selected from the group consisting of SEQ ID NOs: 42 and 102.

11. The method of any one of claims 1 to 10, wherein the antigen-binding protein comprises an amino acid sequence at least 90% identical to a light chain variable region amino acid sequence selected from the group consisting of SEQ ID NOS: 21, 41, 61, 81, 101, 121, 141, 161, 181, 201, 221, 241, 261, 281 and 539.

12. The method of any one of claims 1 to 11, wherein the antigen binding protein comprises an amino acid sequence at least 90% identical to a light chain variable region amino acid sequence selected from the group consisting of SEQ ID NOS: 21, 41, 61, 101, 141, 161, and 281.

13. The method of any one of claims 1 to 12, wherein the antigen binding protein comprises an amino acid sequence at least 90% identical to a light chain variable region amino acid sequence selected from the group consisting of SEQ ID NOS: 41 and 101.

14. The method of any one of claims 1 to 13, wherein the antigen binding protein comprises:
i) a light chain variable domain sequence set out in SEQ ID NO: 21 and a heavy chain variable domain sequence set out in SEQ ID NO: 22;
ii) a light chain variable domain sequence set out in SEQ ID NO: 41 and a heavy chain variable domain sequence set out in SEQ ID NO: 42;
iii) a light chain variable domain sequence set out in SEQ ID NO: 61 and a heavy chain variable domain sequence set out in SEQ ID NO: 62;
iv) a light chain variable domain sequence set out in SEQ ID NO: 81 and a heavy chain variable domain sequence set out in SEQ ID NO: 82;
v) a light chain variable domain sequence set out in SEQ ID NO: 101 and a heavy chain variable domain sequence set out in SEQ ID NO: 102;
vi) a light chain variable domain sequence set out in SEQ ID NO: 121 and a heavy chain variable domain sequence set out in SEQ ID NO: 122;
vii) a light chain variable domain sequence set out in SEQ ID NO: 141 and a heavy chain variable domain sequence set out in SEQ ID NO: 142;
viii) a light chain variable domain sequence set out in SEQ ID NO: 161 and a heavy chain variable domain sequence set out in SEQ ID NO: 162;
ix) a light chain variable domain sequence set out in SEQ ID NO: 181 and a heavy chain variable domain sequence set out in SEQ ID NO: 182;
x) a light chain variable domain set out in SEQ ID NO: 201 and a heavy chain variable domain set out in SEQ ID NO: 202;
xi) a light chain variable domain sequence set out in SEQ ID NO: 221 and a heavy chain variable domain sequence set out in SEQ ID NO: 222;
xii) a light chain variable domain sequence set out in SEQ ID NO: 241 and a heavy chain variable domain sequence set out in SEQ ID NO: 242;
xiii) a light chain variable domain sequence set out in SEQ ID NO: 261 and a heavy chain variable domain sequence set out in SEQ ID NO: 262;
xiv) a light chain variable domain sequence set out in SEQ ID NO: 281 and a heavy chain variable domain sequence set out in SEQ ID NO: 282; or
xv) a light chain variable domain sequence set out in SEQ ID NO: 539 and a heavy chain variable domain sequence set out in SEQ ID NO: 540.

15. The method of any one of claims 1 to 14, wherein the antigen binding protein comprises:
i) a light chain variable domain sequence set out in SEQ ID NO: 21 and a heavy chain variable domain set out in SEQ ID NO: 22;
ii) a light chain variable domain sequence set out in SEQ ID NO: 41 and a heavy chain variable domain sequence set out in SEQ ID NO: 42;
iii) a light chain variable domain sequence set out in SEQ ID NO: 61 and a heavy chain variable domain sequence set out in SEQ ID NO: 62;
iv) a light chain variable domain sequence set out in SEQ ID NO: 101 and a heavy chain variable domain sequence set out in SEQ ID NO: 82;
v) a light chain variable domain sequence set out in SEQ ID NO: 141 and a heavy chain variable domain sequence set out in SEQ ID NO: 142;
vi) a light chain variable domain sequence set out in SEQ ID NO: 161 and a heavy chain variable domain sequence set out in SEQ ID NO: 162;
vii) a light chain variable domain sequence set out in SEQ ID NO: 281 and a heavy chain variable domain sequence set out in SEQ ID NO: 282.

16. The method of any one of claims 1 to 15, wherein the antigen binding protein comprises:
a light chain variable domain sequence set out in SEQ ID NO: 41 and a heavy chain variable domain sequence set out in SEQ ID NO: 42; or a light chain variable domain sequence set out in SEQ ID NO: 101 and a heavy chain variable domain sequence set out in SEQ ID NO: 102.

17. The method of any one of claims 1 to 16, wherein one or more heavy chain framework amino acids of the anti-antigen-binding protein are replaced with corresponding amino acid(s) from another human antibody amino acid sequence.

18. The method of any one of claims 1 to 17, wherein one or more light chain framework amino acids of the antigen-binding protein are replaced with corresponding amino acid(s) from another human antibody amino acid sequence.

19. The method of any one of claims 1 to 18, wherein the heavy chain comprises a constant region selected from heavy chain constant regions of an IgG, IgM, IgA, IgD, IgE, fragments thereof, combinations thereof, and modifications thereof in which one to ten heavy chain framework amino acids are replaced with corresponding amino acid(s) from another human antibody amino acid sequence.

20. A method of treating cardiovascular disease comprising administering to a subject in need thereof a therapeutically effective amount of an antigen binding protein that competes for binding to TREM-1 with an antigen binding protein of any one of claims 1 to 19.

21. The method of any one of claims 1 to 20, wherein the antigen-binding protein is selected from the group consisting of a human antibody, a humanized antibody, a chimeric antibody, a monoclonal antibody, a recombinant antibody, a Fab, a F(ab′)2, a Fab2, a monovalent IgG, an scFv, an scFv-Fc, an IgG1 antibody, an IgG2 antibody, an IgG3 antibody, and an IgG4 antibody.

22. The method of any one of claims 1 to 21, wherein the antigen-binding protein is an IgG1 antibody.

23. The method of any one of claims 1 to 22, wherein the antigen-binding protein is a monovalent IgG.

24. The method of any one of claims 1 to 23, wherein the antigen-binding protein is a human antibody.

25. The method of any one of claims 1 to 24 wherein the antigen binding protein comprises a heavy chain amino acid sequence at least 90% identical to a sequence selected from SEQ ID NOS: 22, 42, 62, 82, 102, 122, 142, 162, 182, 202, 222, 242, 262, 282, and 540 and a light chain amino acid sequence at least 90% identical to a sequence selected from SEQ ID NOS: 21, 41, 61, 81, 101, 121, 141, 161, 181, 201, 221, 241, 261, 281 and 539.

26. The method of any one of claims 1 to 25 wherein the antigen-binding protein has a heavy chain amino acid sequence selected from SEQ ID NOS: 22, 42, 62, 82, 102, 122, 142, 162, 182, 202, 222, 242, 262, 282, and 540 and a light chain amino acid sequence selected from SEQ ID NOS: 21, 41, 61, 81, 101, 121, 141, 161, 181, 201, 221, 241, 261, 281 and 539.

27. The method of any one of claims 1 to 26, wherein the antigen-binding protein has a heavy chain amino acid sequence selected from SEQ ID NOS: 22, 42, 62, 102, 142, 162, and 282.

28. The method of any one of claims 1 to 27, wherein the antigen-binding protein has a heavy chain amino acid sequence selected from SEQ ID NOS: 42 and 102.

29. The method of any one of claims 1 to 27, wherein the antigen-binding protein has a light chain amino acid sequence selected from SEQ ID NOS: 21, 41, 61, 81, 101, 141, 161, and 281.

30. The method of any one of claims 1 to 27, wherein the antigen-binding protein has a light chain amino acid sequence selected from SEQ ID NOS: 41 and 101.

31. The method of any one of claims 1 to 30, wherein the antigen binding protein further comprises a pharmaceutically acceptable carrier.

32. The method of any one of claims 1-31, wherein the cardiovascular disease is selected from the group consisting of myocardial infarction, non-alcoholic fatty liver disease (NAFLD), non-alcoholic steatohepatitis (NASH), heart failure, stroke (ischemic and hemorrhagic), atherosclerosis, coronary artery disease, peripheral vascular disease (e.g. peripheral artery disease), vulnerable plaque, acute coronary syndrome, cerebrovascular disease, cerebrovascular atherosclerosis and obesity.

33. The method of claim any one of claims 1 to 32, wherein the cardiovascular disease is atherosclerosis.

34. The method of any one of claims 1 to 32, wherein the cardiovascular disease is myocardial infarction.

35. The method of any one of claims 1-34, wherein the treatment is administered intravenously or subcutaneously.

36. The method of any one of claims 1-35, wherein the treatment is administered once weekly, once every two weeks, once every three weeks, once every 4 weeks, once monthly, once every 3 months, once every six months, or once yearly.

37. The method of any one of claims 1-36, further comprising administering one or two additional therapeutic agents.

38. The method of claim 37, wherein the additional therapeutic agents are selected from the group consisting of one or more cholesterol-lowering agent, an agent that increases the expression of LDLR, statins (atorvastatin, cerivastatin, fluvastatin, lovastatin, mevastatin, pitavastatin, pravastatin, rosuvastatin, simvastatin), PCSK9 inhibitors (Repatha®, Praluent®, Leqvio®), nicotinic acid (Niacin) (NIACOR®, NIASPANG (slow release niacin), SLO-NIACIN®(slow release niacin), Fibric acid (LOPID® (gemfibrozil), TRICOR® (fenofibrate), Bile acid sequestrants (QUESTRAN® (cholestyramine), colesevelam (WELCHOL®), COLESTID® (colestipol), Cholesterol absorption inhibitors (Zetia (ezetimibe)), combination of nicotinic acid with statin (ADVICOR® (LOVASTATIN and NIASPAN®), combination of a statin with an absorption inhibitor (VYTORIN (ZOCOR® and ZETIA®) and/or lipid modifying agents like PCSK9 inhibitors, PPAR gamma agonists, PPAR alpha/gamma agonists, squalene synthase inhibitors, cholesterylester transfer protein (CETP) inhibitors, anti-hypertensives, anti-thrombotics (aspirin) anti-diabetic agents (such as sulphonyl ureas, insulin, GLP-1 analogs, DDPIV inhibitors, SGL2 inhibitors), ApoB modulators, MTP inhibitors, Corlanor® (ivabradine) I(f) current Inhibitor, omecamtiv mecarbil cardiac myosin activator, OLPASIRAN (AMG890) (siRNA) that lowers lipoprotein(a), AMG 594 cardiac troponin activator, AMG 609, AMG 171 (Growth Differential Factor 15 (GDF15) analog), AMG 133 (gastric inhibitory polypeptide receptor (GIPR) antagonist and glucagon-like peptide 1 (GLP-1) receptor agonist, and/or arteriosclerosis obliterans treatments.

39. The method of any one of claims 1 to 38, wherein the TREM-1 is human TREM-1 set out in SEQ ID NO: 2.

40. The method of any one of claims 1 to 39, wherein the administration reduces one or more symptoms of cardiovascular disease selected from the group consisting of inflammatory cell migration to the site of injury, infiltration of myeloid cells into cardiac tissue, inflammatory cytokines in the microenvironment, tissue damage, reduction in foam cell formation, reduction in necrotic core size, reduction in scar formation, reduction in endothelial cell dysfunction, and/or reduction in thrombus formation.

41. A composition comprising an antigen binding protein that binds to TrigGering Receptor Expressed on Myeloid cells 1 (TREM-1) for use in treating a cardiovascular disease, wherein the antigen binding protein comprises:
a. a light chain variable domain comprising:
i. a light chain CDR1 comprising an amino acid sequence selected from SEQ ID NOS: 10, 30, 50, 70, 90, 110, 130, 150, 170, 190, 210, 230, 250, 270 and 544;
ii. a light chain CDR2 comprising an amino acid sequence selected from SEQ ID NOS: 11, 31, 51, 71, 91, 111, 131, 151, 171, 191, 211, 231, 251, 271, and 545;
iii. a light chain CDR3 comprising an amino acid sequence selected from SEQ ID NOS: 12, 32, 52, 72, 92, 112, 132, 152, 172, 192, 212, 232, 252, 272 and 546; and
b. a heavy chain variable domain comprising:
i. a heavy chain CDR1 comprising an amino acid sequence selected from SEQ ID NOS: 16, 36, 56, 76, 96, 116, 136, 156, 176, 196, 216, 236, 256, 276, and 550;
ii. a heavy chain CDR2 comprising an amino acid sequence selected from SEQ ID NOS: 17, 37, 57, 77, 97, 117, 137, 157, 177, 197, 217, 237, 257, 277, and 551; and
iii. a heavy chain CDR3 comprising an amino acid sequence selected from SEQ ID NOS: 18, 38, 58, 78, 98, 118, 138, 158, 178, 198, 218, 238, 258, 278, and 552.

42. Use of a composition comprising antigen binding protein that binds to TrigGering Receptor Expressed on Myeloid cells 1 (TREM-1) in the preparation of a medicament for treating a cardiovascular disease, the antigen binding protein comprising
a. a light chain variable domain comprising:
i. a light chain CDR1 comprising an amino acid sequence selected from SEQ ID NOS: 10, 30, 50, 70, 90, 110, 130, 150, 170, 190, 210, 230, 250, 270 and 544;
ii. a light chain CDR2 comprising an amino acid sequence selected from SEQ ID NOS: 11, 31, 51, 71, 91, 111, 131, 151, 171, 191, 211, 231, 251, 271, and 545;
iii. a light chain CDR3 comprising an amino acid sequence selected from SEQ ID NOS: 12, 32, 52, 72, 92, 112, 132, 152, 172, 192, 212, 232, 252, 272 and 546; and
b. a heavy chain variable domain comprising:
i. a heavy chain CDR1 comprising an amino acid sequence selected from SEQ ID NOS: 16, 36, 56, 76, 96, 116, 136, 156, 176, 196, 216, 236, 256, 276, and 550;
ii. a heavy chain CDR2 comprising an amino acid sequence selected from SEQ ID NOS: 17, 37, 57, 77, 97, 117, 137, 157, 177, 197, 217, 237, 257, 277, and 551; and
iii. a heavy chain CDR3 comprising an amino acid sequence selected from SEQ ID NOS: 18, 38, 58, 78, 98, 118, 138, 158, 178, 198, 218, 238, 258, 278, and 552.

43. The use of claim 41 or 42 wherein the cardiovascular disease is selected from the group consisting of myocardial infarction, non-alcoholic fatty liver disease (NAFLD), non-alcoholic steatohepatitis (NASH), heart failure, stroke (ischemic and hemorrhagic), atherosclerosis, coronary artery disease, peripheral vascular disease (e.g. peripheral artery disease), vulnerable plaque, acute coronary syndrome, cerebrovascular disease, cerebrovascular atherosclerosis and obesity.

44. A method of treating cardiovascular disease comprising administering to a subject in need thereof a therapeutically effective amount of an antigen binding protein that binds to TrigGering Receptor Expressed on Myeloid cells 1 (TREM-1), the antigen binding protein comprising:
a. a light chain variable domain comprising:
i. a light chain CDR1 comprising an amino acid sequence X₁ASQSX₂X₃X₄NLA (SEQ ID NO: 553), wherein X₁ is R or Q, wherein X₂ is V or I, wherein X₃ is N or S, and wherein X₄ is S, H, I, V or A;
ii. a light chain CDR2 comprising an amino acid sequence GAX₁X₂RAT (SEQ ID NO: 554), wherein X₁ is S or Y, and wherein X₂ is T or I; and
iii. a light chain CDR3 comprising an amino acid sequence QX₁X₂X₃X₄X₅X₆PX₇T (SEQ ID NO: 555); wherein X₁ is Q, H or E, wherein X₂ is F or Y, wherein X₃ is K, Y or I, wherein X₄ is N, T, L, I, or M; wherein X₅ is W, F, H or Y, wherein X₆ is absent or P; wherein X₇ is W, N, Y, H or L; and
b. a heavy chain variable domain comprising:
i. a heavy chain CDR1 comprising an amino acid sequence X₁X₂X₃MX₄ (SEQ ID NO: 556), wherein X₁ is A, R, T or S, wherein X₂ is Y or N, wherein X₃ is A or W, and wherein X₄ is S or N;
ii. a heavy chain CDR2 comprising an amino acid sequence X₁X₂X₃X₄X₅X₆ X₇ X₈ X₉YYX₁₀ X₁₁X₁₂VKG (SEQ ID NO: 559), wherein X₁ is T, E, or S, wherein X₂ is absent or is M, V, or I, wherein X₃ is S, R or K, wherein X₄ is G or Q, wherein X₅ is S, D or H, wherein X₆ is G, S L, or A, wherein X₇ is S, G, or R, wherein X₈ is T, S, P or E, wherein X₉ is T or I, wherein X₁₀ is A or V, wherein X₁₁ is D or E, and wherein X₁₂ is S or A; and
iii. a heavy chain CDR3 comprising an amino acid sequence X₁X₂X₃X₄X₅X₆ X₇ F X₈YYX₉ (SEQ ID NO: 557), wherein X, is V, E, A or G, wherein X₂ is A, F, Y or G, wherein X₃ is G, S, Y or W, wherein X₄ is S or R, wherein X₅ is absent or is N, wherein X₆ is F, S, Y, or absent, wherein X₇ is L or F or absent, wherein Xₐ is D or E, and wherein X₉ is Y, H or S.

45. The method of claim 44, wherein the antigen binding protein comprises:
a. a light chain variable domain comprising:
i. a light chain CDR1 comprising an amino acid sequence RASQSVNSNLA (SEQ ID NO: 556);
ii. a light chain CDR2 comprising an amino acid sequence GASTRAT (SEQ ID NO: 573);
iii. a light chain CDR3 comprising an amino acid sequence QQFKNWPPT (SEQ ID NO: 576); and
b. a heavy chain variable domain comprising:
i. a heavy chain CDR1 comprising an amino acid sequence AYAMS (SEQ ID NO: 581);
ii. a heavy chain CDR2 comprising an amino acid sequence TSGSGSTTYYADSVKG (SEQ ID NO: 584); and
iii. a heavy chain CDR3 comprising an amino acid sequence VAGSNFLFDY (SEQ ID NO: 842).

46. A method of treating cardiovascular disease comprising administering to a subject in need thereof a therapeutically effective amount of an antigen binding protein that binds to TrigGering Receptor Expressed on Myeloid cells 1 (TREM-1) wherein the antigen binding protein comprises;
a. a light chain variable domain comprising:
i. a light chain CDR1 comprising an amino acid sequence QASX₁DIX₂X₃X₄LN (SEQ ID NO: 558), wherein X₁ is R or Q, wherein X₂ is R, S, N or F, wherein X₃ is K or N, and wherein X₄ is H, Y or D;
ii. a light chain CDR2 comprising an amino acid sequence X₁X₂X₃X₄LET (SEQ ID NO: 560), wherein X₁ is D, G or H, wherein X₂ is A, V or T, wherein X₃ is S, A or Y, and wherein X₄ is T or N;
iii. a light chain CDR3 comprising an amino acid sequence QX₁YX₃X₄X₅PX₆T (SEQ ID NO: 561), wherein X₁ is Q or H, wherein X₂ is D, A or G, wherein X₃ is N or K; wherein X₄ is L or I, and wherein X₅ is I or L; and
b. a heavy chain variable domain comprising:
i. a heavy chain CDR1 comprising an amino acid sequence X₁YDIN (SEQ ID NO: 563), wherein X₁ is R or S;
ii. a heavy chain CDR2 comprising an amino acid sequence X₁X₂NPX₃X₄GX₅X₆GX₇X₈ X₉X₁₀FX₁₁X₁₂ (SEQ ID NO: 564), wherein X₁ is W or R, wherein X₂ is M or L, wherein X₃ is N, Q, or K, wherein X₄ is S, A, or R, wherein X₅ is N, or Q, wherein X₆ is S, A, or T, wherein X₇ is S, Q, or Y, wherein X₈ is V or T, wherein X₉ is Q or K, wherein X₁₀ is K or N, wherein X₁₁ is R or Q, and wherein X₁₂ is G or D; and
iii. a heavy chain CDR3 comprising an amino acid sequence X₁X₂X₃X₄ X₅X₆ X₇ X₈ X₉X₁₀X₁₁X₁₂FX₁₃X₁₄ (SEQ ID NO: 565); wherein X₁ is G, L or R, wherein X₂ is G, I, or R, wherein X₃ is Y, R, I, G, or A, wherein X₄ is T, S, Y, or V, wherein X₅ is S or Y, wherein X₆ is S, A, I, or R, wherein X₇ is W, A, or S, wherein X₈ is absent or is S, wherein X₉ is absent or is F, W, or Y, and wherein X₁₀ is R, S, H, K, or E, wherein X₁₁ is W, H, Y, or F, wherein X₁₂ is Y, V, A, or S, wherein X₁₃ is D or Q, and wherein X₁₄ is L, Y, I, or H.

47. The method of claim 46, wherein the antigen binding protein comprises:
a. a light chain variable domain comprising:
i. a light chain CDR1 comprising an amino acid sequence QASQDIRKHLN (SEQ ID NO: 567);
ii. a light chain CDR2 comprising an amino acid sequence DASNLET (SEQ ID NO: 574); and
iii. a light chain CDR3 comprising an amino acid sequence QHYDNLPIT (SEQ ID NO: 577); and
b. a heavy chain variable domain comprising:
i. a heavy chain CDR1 comprising an amino acid sequence RYDIN (SEQ ID NO: 582);
ii. a heavy chain CDR2 comprising an amino acid sequence WMNPNSGNSSVQKFRG (SEQ ID NO: 585); and
iii. a heavy chain CDR3 comprising an amino acid sequence GGYTSSWRWYFDL (SEQ ID NO: 843) or GGYTSSWSRWYFDL (SEQ ID NO: 844).
(SEQ ID NO: 843)
GGYTSSWRWYFDL
or
(SEQ ID NO: 844)
GGYTSSWSRWYFDL.
